(19) United States
(12) Patent Application Publication
(10) Pub. No.: US 2025/0188127 A1
(43) Pub. Date: Jun. 12, 2025

(54) BIOLOGICALLY PRODUCED NUCLEIC ACID FOR VACCINE PRODUCTION

(71) Applicant: Universität Basel, Basel (CH)

(72) Inventors: Enja Tatjana KIPFER, Liestal (CH); Thomas KLIMKAIT, Lörrach (DE); Christian MITTELHOLZER, Binningen (CH); Fabian OTTE, Efringen-Kirchen (DE)

(73) Assignee: Universität Basel, Basel (CH)

(21) Appl. No.: 18/690,452

(22) PCT Filed: Sep. 9, 2022
(86) PCT No.: PCT/EP2022/075140

§ 371 Date: Mar. 8, 2024

(30) Foreign Application Priority Data
Sep. 9, 2021 (EP) 21195643.8
Jun. 19, 2022 (EP) 22179777.2

(51) Int. Cl. C07K 14/005; A61K 39/215

(52) U.S. Cl. CPC C07K 14/005; A61K 39/215; C12N 2770/20022; C12N 2770/20034; C12N 2770/20051

(57) ABSTRACT

The invention relates to a biologically produced nucleic acid sequence comprising two or three primary nucleic acid sequence parts of SARS-COV-2 and not more than three secondary nucleic acid sequence parts, wherein a secondary nucleic acid sequence part encodes an amino acid sequence having the function of a SARS-COV-2 amino acid sequence encoded by ORF3a, ORF6, ORF7a or ORF8. The invention further relates to a host cell or a kit for producing the nucleic acid of the invention, a vector encoding the nucleic acid of the invention and products that can be obtained by the expression of the nucleic acid of the invention such as virus envelopes. The invention further relates a pharmaceutical composition comprising the nucleic acid of the invention or products derived thereof, preferably for use in the prevention of SARS-COV-2.

[0001] The invention relates to a biologically produced nucleic acid sequence comprising two or three primary nucleic acid sequence parts of SARS-COV-2 and not more than three secondary nucleic acid sequence parts, wherein a secondary nucleic acid sequence part encodes an amino acid sequence having the function of a SARS-COV-2 amino acid sequence encoded by ORF3a, ORF6, ORF7a or ORF8. The invention further relates to a host cell or a kit for producing the nucleic acid of the invention, a vector encoding the nucleic acid of the invention and products that can be obtained by the expression of the nucleic acid of the invention such as virus envelopes. The invention further relates a pharmaceutical composition comprising the nucleic acid of the invention or products derived thereof, preferably for use in the prevention of SARS-CoV-2.

[0002] The rapid development and availability of vaccines is crucial in combating many viruses and bacteria. The production of suitable vaccines is a multi-stage, complex process and is not always successful despite often high investments. Typically, the development of a suitable vaccine takes years. These long development times consist of a major problem, especially with regard to new emerging pathogens, or mutated pathogens, as from an epidemiological point of view it is only possible to react too late, if at all, to the emergence of new diseases. In contrast, the analysis, identification and further detection of new or heavily mutated pathogens are now possible within weeks or even days, which is a huge improvement over the last century.

[0003] In this context, viruses are of special interest, as they harbor high mutation rates causing the spread from other species to humans. Rapid spreading of these viruses makes them a major challenge for modern medicine. The usual time between the detection/identification of a newly emerging virus and the development of a vaccine is typically years. In a few cases, with sufficient prior knowledge, experimental vaccines could be provided within months. However, this time span is much longer than the typical time until thousands or millions of people are infected. Such rapid spread is also a direct consequence of the high mobility of today's society.

[0004] Ideally, immediately after the identification of a new virus, a vaccine would be available in sufficient quantity and of the highest quality and would allow for a nationwide vaccination of all persons who have somehow come close to the initial outbreak site of the new virus. Furthermore, an ideal method for such a vaccine would be capable of reacting to the evolution and adaptation of the virus. Such an ideal production possibility seems utopian to the person skilled in the art today.

[0005] In the recent past in particular, the corona pandemic has dramatically increased the relevance of developing suitable tools for vaccine production. There is unanimous agreement that the development of a vaccine against the coronavirus SARS-COV-2 is the only proven means of containing the pandemic and the associated global crisis in the long term.

[0006] Thus, there is a need for to provide an instrument which allows the production of a vaccine against the coronavirus SARS-COV-2, in large quantities and of high quality.

[0007] The above technical problem is solved by the embodiments disclosed herein and as defined in the claims.

[0008] Accordingly, the invention relates to, inter alia, the following embodiments:
[0009] 1. A biologically produced nucleic acid sequence comprising
   [0010] a) two or three primary nucleic acid sequence parts, wherein a primary nucleic acid sequence part encodes an amino acid sequence selected from the group consisting of
      [0011] i) SEQ ID NO: 1 (SARS-COV-2 N) or an amino acid sequence with at least 90% sequence identity thereof;
      [0012] ii) SEQ ID NO: 2 (SARS-COV-2 S) or an amino acid sequence with at least 90% sequence identity thereof;
      [0013] iii) SEQ ID NO: 3 (SARS-COV-2 E) or an amino acid sequence with at least 90% sequence identity thereof; and
      [0014] iv) SEQ ID NO: 4 (SARS-COV-2 M) or an amino acid sequence with at least 90% sequence identity thereof; and
   [0015] b) not more than three, not more than two not more than one or no secondary nucleic acid sequence part(s), wherein a secondary nucleic acid sequence part encodes an amino acid sequence having the function of a SARS-COV-2 amino acid sequence encoded by ORF3a, ORF6, ORF7a, or ORF8, wherein if no sequence part of a) iii) and no nucleic acid sequence part that encodes an amino acid sequence having the function of a SARS-COV-2 amino acid sequence encoded by ORF3a are present, then not more than five, not more than four, not more than three nucleic acid sequence parts selected from a) i), a) ii), a) iv), and nucleic acid sequence parts encoding an amino acid sequence having the function of a SARS-COV-2 amino acid sequence encoded by ORF6, ORF7a, or ORF8 are present.
[0016] 2. The nucleic acid sequence of embodiment 1, wherein the nucleic acid sequence comprises two or three primary nucleic acid sequence parts, wherein a primary nucleic acid sequence part encodes an amino acid sequence selected from the group consisting of
   [0017] i) SEQ ID NO: 1 (SARS-COV-2 N) or an amino acid sequence with at least 90% sequence identity thereof;
   [0018] ii) SEQ ID NO: 2 (SARS-COV-2 S) or an amino acid sequence with at least 90% sequence identity thereof; and
   [0019] iii) SEQ ID NO: 3 (SARS-COV-2 E) or an amino acid sequence with at least 90% sequence identity thereof; and
      wherein the nucleic acid sequence has no sequence part that encodes an amino acid sequence having the function of a SARS-COV-2 amino acid sequence encoded by SEQ ID NO: 4 (SARS-COV-2 M).
[0020] 3. The nucleic acid sequence of embodiment 2, wherein the nucleic acid sequence comprises three primary nucleic acid sequence parts:
   [0021] i) SEQ ID NO: 1 (SARS-COV-2 N) or an amino acid sequence with at least 90% sequence identity thereof;
   [0022] ii) SEQ ID NO: 2 (SARS-COV-2 S) or an amino acid sequence with at least 90% sequence identity thereof; and
   [0023] iii) SEQ ID NO: 3 (SARS-COV-2 E) or an amino acid sequence with at least 90% sequence identity thereof.
[0024] 4. The nucleic acid sequence of embodiment 2 or 3, wherein
   [0025] 1.) the nucleic acid sequence comprises no nucleic acid sequence part encodes an amino acid sequence having the function of a SARS-COV-2 amino acid sequence encoded by ORF7 and ORF8;
   [0026] 2.) the nucleic acid sequence comprises no nucleic acid sequence part encodes an amino acid sequence having the function of a SARS-COV-2 amino acid sequence encoded by ORF6 and ORF7ab; or
   [0027] 3.) the nucleic acid sequence comprises no nucleic acid sequence part encodes an amino acid sequence having the function of a SARS-COV-2 amino acid sequence encoded by ORF6, ORF7ab and ORF8.
[0028] 5. The nucleic acid sequence of embodiment 4, wherein the nucleic acid sequence comprises a primary nucleic acid sequence part encoding an amino acid sequence a) i), a secondary nucleic acid sequence part encoding an amino acid sequence having the function of a SARS-COV-2 amino acid sequence encoded by ORF3a and a sequence part of the nucleic acid sequence located between the primary nucleic acid sequence part encoding an amino acid sequence a) i) and the secondary nucleic acid sequence part encoding an amino acid sequence having the function of a SARS-COV-2 amino acid sequence encoded by ORF3a, wherein the sequence part comprises
   [0029] I) SEQ ID NO: 35 or a sequence having at least 90% sequence identity to SEQ ID NO: 35;
   [0030] II) SEQ ID NO: 36 or a sequence having at least 90% sequence identity to SEQ ID NO: 36; or
   [0031] III) SEQ ID NO:37 or a sequence having at least 90% sequence identity to SEQ ID NO: 37.
[0032] 6. A biologically produced nucleic acid sequence comprising two or three nucleic acid sequence parts encoding an amino acid sequence selected from the group consisting of:
   [0033] i) SEQ ID NO: 1 (SARS-COV-2 N) or an amino acid sequence with at least 90% sequence identity thereof;
   [0034] ii) SEQ ID NO: 2 (SARS-COV-2 S) or an amino acid sequence with at least 90% sequence identity thereof; and
   [0035] iii) SEQ ID NO: 3 (SARS-COV-2 E) or an amino acid sequence with at least 90% sequence identity thereof; and
      wherein the nucleic acid sequence has no sequence part that encodes an amino acid sequence having the function of a SARS-COV-2 amino acid sequence encoded by SEQ ID NO: 4 (SARS-COV-2 M),
      preferably wherein the nucleic acid sequence comprises a sequence as defined by SEQ ID NO: 33.
[0036] 7. The nucleic acid sequence of embodiment 3, wherein the nucleic acid sequence comprises two primary nucleic acid sequence parts:
   [0037] i) SEQ ID NO: 1 (SARS-COV-2 N) or an amino acid sequence with at least 90% sequence identity thereof; and
   [0038] ii) SEQ ID NO: 2 (SARS-COV-2 S) or an amino acid sequence with at least 90% sequence identity thereof; and
      wherein the nucleic acid sequence has no sequence part that encodes an amino acid sequence having the function of a SARS-COV-2 amino acid sequence encoded by SEQ ID NO: 4 (SARS-COV-2 M) and SEQ ID NO: 3 (SARS-COV-2 E),
      preferably wherein the nucleic acid sequence comprises a sequence as defined by SEQ ID NO: 34.
[0039] 8. The nucleic acid sequence of embodiment 1, wherein for the secondary nucleic acid sequence part encoding an amino acid sequence having the function of a SARS-COV-2 amino acid sequence
   [0040] i) ORF3a is a sequence defined by SEQ ID NO: 5;
   [0041] ii) ORF6 is a sequence defined by SEQ ID NO: 6;
   [0042] iii) ORF7a is a sequence defined by SEQ ID NO: 7; and/or
   [0043] iv) ORF8 is a sequence defined by SEQ ID NO: 9.
[0044] 9. The nucleic acid sequence of embodiment 1 or 8, wherein the nucleic acid sequence comprises three primary nucleic acid sequence parts.
[0045] 10. The nucleic acid sequence of any one of embodiments 1, 8 or 9, wherein one of the secondary nucleic acid sequence parts encodes an amino acid sequence having the function of a SARS-COV-2 amino acid sequence encoded by ORF3a.
[0046] 11. The nucleic acid sequence of any one of embodiments 1, 8 to 10, wherein the primary nucleic acid sequence parts and the secondary nucleic acid sequence parts are ordered in 5′ to 3′ direction in the following order:
   [0047] 1. SEQ ID NO: 2 (SARS-COV-2 S) or an amino acid sequence with at least 90% sequence identity thereof,
   [0048] 2. nucleic acid sequence part encoding an amino acid sequence having the function of a SARS-COV-2 amino acid sequence encoded by ORF3a;
   [0049] 3. SEQ ID NO: 3 (SARS-COV-2 E) or an amino acid sequence with at least 90% sequence identity thereof,
   [0050] 4. SEQ ID NO: 4 (SARS-COV-2 M) or an amino acid sequence with at least 90% sequence identity thereof,
   [0051] 5. nucleic acid sequence part encoding an amino acid sequence having the function of a SARS-COV-2 amino acid sequence encoded by ORF6,
   [0052] 6. nucleic acid sequence part encoding an amino acid sequence having the function of a SARS-COV-2 amino acid sequence encoded by ORF7a,
   [0053] 7. nucleic acid sequence part encoding an amino acid sequence encoding an amino acid sequence having the function of a SARS-COV-2 amino acid sequence encoded by ORF8,
   [0054] 8. SEQ ID NO: 1 (SARS-COV-2 N) or an amino acid sequence with at least 90% sequence identity thereof.
[0055] 12. The nucleic acid sequence of any one of embodiments 1, 8 to 11, wherein the nucleic acid sequence comprises a nucleic acid sequence defined by the SEQ ID NO: 10 (SARS-COV-2 genome) or a sequence with at least 90% sequence identity thereof with a deletion and/or a dysfunctionality of:
   [0056] a) the E gene, ORF6 gene, ORF7a gene and ORF8 gene; or
   [0057] b) the E gene, ORF6 gene and ORF8 gene.
[0058] 13. A vector comprising the nucleic acid sequence of one of the preceding embodiments.
[0059] 14. The vector of embodiment 13, wherein the vector is a plasmid vector.
[0060] 15. The vector of embodiment 14, wherein the vector comprises
   [0061] a) a sequence as defined by SEQ ID NO: 11 (biologically produced vector with ORF7a gene) or a sequence having 90% sequence identity thereof; or
   [0062] b) a sequence as defined by SEQ ID NO: 12 (biologically produced vector without ORF7a gene) or a sequence having 90% sequence identity thereof.
[0063] 16. A host cell comprising the nucleic acid sequence of embodiments 1 to 12 or the vector of embodiments 13 to 15.
[0064] 17. The host cell of embodiment 16 additionally comprising at least one complementary SARS-COV-2 sequence thereof.
[0065] 18. A method of production of a virus envelope and/or a fragment of a virus envelope and/or virus envelope protein comprising culturing the host cell of embodiment 16 or 16.
[0066] 19. A kit comprising
   [0067] I.) the nucleic acid sequence of any one of the of embodiments 1 to 12, the vector of embodiments 13 to 15, or the host cell of embodiment 16; and
   [0068] II.) at least one SARS-COV-2 sequence part complementary to the nucleic acid sequence comprised in (I.).
[0069] 20. A virus envelope or a fragment of a virus envelope and/or virus envelope protein, wherein the virus envelope or the fragment of a virus envelope and/or the virus envelope protein
   [0070] a) package the at least one nucleic acid of any one of embodiments 1 to 12; and
   [0071] b) are obtainable by gene expression using at least one nucleic acid of any one of embodiments 1 to 6, using the vector of any one of embodiments 13 to 15, using the host cell of embodiment 16 or 17, using the method of embodiment 18 or using the kit of embodiment 19.
[0072] 21. A pharmaceutical composition comprising
   [0073] a) at least one nucleic acid according to one of embodiments 1 to 12; and
   [0074] b) at least one amino acid sequence obtainable by gene expression using at least one nucleic acid of any one of embodiments 1 to 12, using the vector of any one of embodiments 13 to 15, using the host cell of embodiment 16 or 17, using the method of embodiment 18 or using the kit of embodiment 19.

[0075] 22. The pharmaceutical composition of embodiment 21, wherein the at least one amino acid sequence is the virus envelope or a fragment of a virus envelope and/or virus envelope protein of embodiment 20.

[0076] 23. The pharmaceutical composition according to embodiment 21 or 22 for use as a medicament.

[0077] 24. The pharmaceutical composition according to embodiment 21 or 22 for use in the prevention of a SARS-COV-2 infection or at least one symptom thereof.

[0078] Accordingly, the invention relates to a nucleic acid sequence comprising a) two or three primary nucleic acid sequence parts, wherein a primary nucleic acid sequence part encodes an amino acid sequence selected from the group consisting of i) SEQ ID NO: 1 (SARS-COV-2 N) or an amino acid sequence with at least 90%, at least 91%, at least 92%, at least 93%, at least 94%, at least 95%, at least 96%, at least 97%, at least 98%, or at least 99% sequence identity thereof; ii) SEQ ID NO: 2 (SARS-COV-2 S) or an amino acid sequence with at least 90%, at least 91%, at least 92%, at least 93%, at least 94%, at least 95%, at least 96%, at least 97%, at least 98%, or at least 99% sequence identity thereof; iii) SEQ ID NO: 3 (SARS-COV-2 E) or an amino acid sequence with at least 90%, at least 91%, at least 92%, at least 93%, at least 94%, at least 95%, at least 96%, at least 97%, at least 98%, or at least 99% sequence identity thereof; and iv) SEQ ID NO: 4 (SARS-COV-2 M) or an amino acid sequence with at least 90%, at least 91%, at least 92%, at least 93%. at least 94%, at least 95%, at least 96%, at least 97%, at least 98%, or at least 99% sequence identity thereof; and b) not more than three, not more than two not more than one or no secondary nucleic acid sequence part(s), secondary nucleic acid sequence parts, wherein each secondary nucleic acid sequence part encodes an amino acid sequence having the function of a SARS-COV-2 amino acid sequence encoded by ORF3a, ORF6, ORF7a, or ORF8, wherein if no sequence part of a) iii) and no nucleic acid sequence part that encodes an amino acid sequence having the function of a SARS-COV-2 amino acid sequence encoded by ORF3a are present, then not more than five, not more than four, not more than three nucleic acid sequence parts selected from a) i), a) ii), a) iv), and nucleic acid sequence parts encoding an amino acid sequence having the function of a SARS-COV-2 amino acid sequence encoded by ORF6, ORF7a, or ORF8 are present.

[0079] The nucleic acid of the invention is preferably biologically produced.

[0080] The term “nucleic acid sequence”, as used herein, refers to either DNA, RNA, and any modifications thereof. The nucleic acid may be single-stranded or double-stranded. Modifications include, but are not limited to, those which provide other chemical groups that incorporate additional charge, polarizability, hydrogen bonding, electrostatic interaction, and fluxionality to the nucleic acid ligand bases or the nucleic acid ligand as a whole. Such modifications include, but are not limited to, 2′-position sugar modifications, 5-position pyrimidine modifications, 8-position purine modifications, modifications at exocyclic amines, substitution of 4-thiouridine, substitution of 5-bromo or 5-iodo-uracil; backbone modifications, methylations, unusual base-pairing combinations such as the isobases isocytidine and isoguanidine. Modifications can also include 3′ and 5′ modifications such as capping.

[0081] Any deoxyribonucleic acid described herein, may alternatively refer to a corresponding ribonucleic acid. In these, the corresponding ribonucleic acid has sequence parts as defined above in which thymine (T) is replaced by uracil (U).

[0082] The terms “primary” and “secondary”, as used herein, is used to distinguish between two groups of nucleic acid without necessarily describing a structural property.

[0083] The term “percent (%) sequence identity” with respect to a reference sequence is defined as the percentage of nucleotides or amino acid residues in a candidate sequence that are identical with the nucleotides or amino acid residues in the reference sequence, after aligning the sequences and introducing gaps, if necessary, to achieve the maximum percent sequence identity, and not considering any conservative substitutions as part of the sequence identity. Alignment for purposes of determining percent amino acid sequence identity can be achieved in various ways that are within the skill in the art, for instance, using publicly available computer software such as BLAST, BLAST-2, ALIGN or Megalign (DNASTAR) software. Those skilled in the art can determine appropriate parameters for aligning sequences, including any algorithms needed to achieve maximal alignment over the full length of the sequences being compared.

[0084] In some embodiments, the nucleotide acid sequence of the invention is altered (e.g., to facilitate the production process of the nucleotide acid sequence or products thereof) without altering or by unsubstantially altering the properties of the protein products.

[0085] In some embodiments, the alterations of the nucleotide acid sequence of the invention include at least one alteration selected from the group of
[0086] 1) base substitutions insertions, or deletions relative to the reference sequence without altering or by unsubstantially altering the properties of the protein products;
[0087] 2) replacing codons with synonymous versions; and
[0088] 3) reduction of the number of hypothetical genetic elements present within protein-coding sequences such as (alternative) ORFs, predicted gene internal transcriptional start sites, and/or sequence motifs (predicted or cryptic) that fine-tune translation rates (e.g., ribosome stalling motifs).

[0089] Testing whether the genes of the altered nucleotide acid sequence of the invention remain functional will identify genes in which additional information beyond the amino acid code is necessary for proper functioning.

[0090] In some embodiments, the nucleotide acid sequence described herein is altered to improve the biological function of the encoded protein products.

[0091] Such a biological function includes but is not limited to stability enhancement, production facilitation (e.g., insertion of additional replication initiating sequences), altered antigenicity, replication limitation.

[0092] In some embodiments, the nucleotide acid sequence described herein is altered to encode at least one alternative protein of interest with a similar structure but alternative biological function, such as the function of a protein of a SARS-COV-2 variant.

[0093] The person skilled in the art can obtain such an altered nucleotide sequence by analyzing the sequence coding for at least one alternative protein of interest (e.g. the nucleotide acid sequence of a mutated virus) and implementing the relevant alterations (e.g. mutations) into the corresponding nucleotide acid sequence described herein.

[0094] In some embodiments, the SARS-COV-2 described herein is a SARS-COV-2 variant comprising at least one mutation selected from the group of del 69-70, RSYLTPGD246-253N, N440K, G446V, L452R, Y453F, S477G/N, E484Q, E484K, F490S, N501Y, N501S, D614G, Q677P/H, P681H and P681R.

[0095] In some embodiments, the SARS-COV-2 described herein is a SARS-COV-2 variant selected from the group of Lineage B.1.1.207, Lineage B.1.1.7, Cluster 5, 501.V2 variant, Lineage P.1, Lineage B.1.429/CAL.20C, Lineage B.1.525, Lineage B1.620, Lineage C 37 and Lineage B.1.621.

[0096] In some embodiments, the SARS-COV-2 described herein is a SARS-COV-2 variant described by a Nextstrain clade selected from the group 19A, 20A, 20C, 20G, 20H, 20B, 20D, 20F, 20I, 20E and 21A.

[0097] The skilled person is aware of how to implement additional mutations or combination of mutations described herein based on new occurring SARS-COV-2 variants.

[0098] In some embodiments, the sequence coding for at least one alternative protein of interest comprises sequences coding for a protein that is characteristic for at least one SARS-COV-2 variant. In some embodiments, the protein that is characteristic for at least one SARS-COV-2 variant is a protein that is encoded by a sequence having at least 90%, having at least 91%, having at least 92%, having at least 93%, having at least 94%, having at least 95%, at least 96%, at least 97%, at least 98%, at least 99%, at least 99.1%, at least 99.2%, at least 99.3%, at least 99.4%, at least 99.5%, at least 99.6%, at least 99.7%, at least 99.8%, or at least 99.9% sequence identity to the sequences SEQ ID NO: 13, SEQ ID NO: 14, SEQ ID NO: 15 and/or SEQ ID NO: 16.

[0099] This implementation of the relevant alterations can be achieved for example by insertion, deletion, substitution, and/or modification of at least one base, but not more than the percentage of the nucleotide acid sequence described herein.

[0100] The term “biologically produced”, as used herein, means that oligomeric fragments of the nucleic acid according to the invention with a length of less than 1000 bases are produced by at least one PCR-driven molecular biology technique. Therefore, the short oligomers are not exclusively produced by chemical reaction steps using chemical reagents. PCR-driven molecular biology techniques may also be used during individual late production steps, such as the joining of already longer oligomers. The latter can in turn optionally be synthetic. Biologically produced nucleic acids can be identical to naturally occurring nucleic acids. Biologically produced nucleic acids differ from fully synthetic nucleic acids in one or more of the following sequence features:
[0101] 1.) the presence of one or more enzymatic restriction sites, in particular, restriction sites for Type IIS restriction endonucleases, which are known to the person skilled in the art;
[0102] 2.) the presence or increased occurrence, compared to the corresponding fully synthetic nucleic acids, of repeating nucleic acid sequences with more than 9 consecutive units of the same base within the biologically produced nucleic acid nucleic acid;
[0103] 3.) the presence or increased occurrence of repeating base-pair sequences with more than 12 bases compared to the corresponding fully synthetic nucleic acids;
[0104] 4.) the presence or increased occurrence, relative to the corresponding fully synthetic nucleic acids, of indirectly repeating base-pair segments consisting of more than 12 base units known to the person skilled in the art as reverse-complementary sequences therefor;
[0105] 5.) the presence or increased occurrence, relative to the corresponding fully synthetic nucleic acids, of nucleic acid sequences with more than 9 consecutive repetitions of duplicate base units (dinucleotide repeats) known to the person skilled in the art; and
[0106] 6.) the presence or increased occurrence, relative to the corresponding fully synthetic nucleic acids, of nucleic acid sequences with more than five consecutive repetitions of triple base units (trinucleotide repeats) known to the person skilled in the art.

[0107] The phrase “sequence having the function of a SARS-COV-2 amino acid sequence”, as used herein, refers to a sequence having the function of a SARS-COV-2 amino acid sequence encoded by the sequence as defined by the SEQ ID NO: 10. The structure and function of SARS-COV-2 amino acid sequences are known in the art (see e.g. Yadav, Rohitash et al., 2021, Cells vol. 10,4 821; Arya, Rimanshee, et al., 2021, Journal of molecular biology 433.2:166725; Gorkhali, R., et al., 2021, Bioinformatics and Biology Insights, 15, 11779322211025876; Redondo N, et al., 2021, Front Immunol. July 7;12:708264). In some embodiments, the sequence having the function of a SARS-COV-2 amino acid sequence described herein is a sequence comprised in SEQ ID NO: 10 or a sequence having at least 90%, having at least 91%, having at least 92%, having at least 93%, having at least 94%, having at least 95%, at least 96%, at least 97%, at least 98%, at least 99%, at least 99.1%, at least 99.2%, at least 99.3%, at least 99.4%, at least 99.5%, at least 99.6%, at least 99.7%, at least 99.8%, or at least 99.9% sequence identity to the sequence comprised in SEQ ID NO: 10. Such % sequence variation can for example derive from one or more mutations of a SARS-CoV-2 variant in the SEQ ID NO: 10 or from insertions, deletions and/or replacements, preferably conservative insertions, deletions and/or replacements that alter the sequence without altering or without substantially altering the function of the encoded amino acid sequence.

[0108] The function of a SARS-COV-2 amino acid sequence encoded by ORF3a as well as ORF3a sequences and mutations thereof are known in the art (see e.g. Bianchi M, et al., 2021, Int J Biol Macromol. 2021; 170:820-826. ) The most common mutations in the ORF3a sequence are V13L, Q57H, Q57H+A99V, G196V and G252V. In some embodiments, the secondary nucleic acid sequence part encoding an amino acid sequence having the function of ORF3a is a sequence encoding SEQ ID NO: 5 or a sequence encoding SEQ ID NO: 5 having at least 90%, having at least 91%, having at least 92%, having at least 93%, having at least 94%, having at least 95%, at least 96%, at least 97%, at least 98%, at least 99%, at least 99.1%, at least 99.2%, at least 99.3%, at least 99.4%, at least 99.5%, at least 99.6%, at least 99.7%, at least 99.8%, or at least 99.9% sequence identity to the sequence encoding SEQ ID NO: 5. In some embodiments, the secondary nucleic acid sequence part encoding an amino acid sequence having the function of ORF3a is a sequence as defined by SEQ ID NO: 17 having at least 90%, having at least 91%, having at least 92%, having at least 93%, having at least 94%, having at least 95%, at least 96%, at least 97%, at least 98%, at least 99%, at least 99.1%, at least 99.2%, at least 99.3%, at least 99.4%, at least 99.5%, at least 99.6%, at least 99.7%, at least 99.8%, or at least 99.9% sequence identity to SEQ ID NO: 17. Such % sequence variation can for example derive from one or more mutations described in Bianchi M, et al., 2021, Int J Biol Macromol. 2021;170:820-826 or from insertions, deletions and/or replacements, preferably conservative insertions, deletions and/or replacements that alter the sequence without altering or without substantially altering the function of the encoded amino acid sequence.

[0109] The function of a SARS-COV-2 amino acid sequence encoded by ORF6 as well as ORF6 sequences and mutations thereof are known in the art (see e.g. Hassan, Sk Sarif, Pabitra Pal Choudhury, and Bidyut Roy, 2021, Meta Gene 28:100873.) In some embodiments, the secondary nucleic acid sequence part encoding an amino acid sequence having the function of ORF6 is a sequence encoding SEQ ID NO: 6 or a sequence having at least 90%, having at least 91%, having at least 92%, having at least 93%, having at least 94%, having at least 95%, at least 96%, at least 97%, at least 98%, at least 99%, at least 99.1%, at least 99.2%, at least 99.3%, at least 99.4%, at least 99.5%, at least 99.6%, at least 99.7%, at least 99.8%, or at least 99.9% sequence identity to the sequence encoding SEQ ID NO: 6. In some embodiments, the secondary nucleic acid sequence part encoding an amino acid sequence having the function of ORF6 is a sequence as defined by SEQ ID NO: 18 having at least 90%, having at least 91%, having at least 92%, having at least 93%, having at least 94%, having at least 95%, at least 96%, at least 97%, at least 98%, at least 99%, at least 99.1%, at least 99.2%, at least 99.3%, at least 99.4%, at least 99.5%, at least 99.6%, at least 99.7%, at least 99.8%, or at least 99.9% sequence identity to SEQ ID NO: 18. Such % sequence variation can for example derive from one or more mutations described in Hassan, Sk Sarif, Pabitra Pal Choudhury, and Bidyut Roy, 2021, Meta Gene 28:100873 or from insertions, deletions and/or replacements, preferably conservative insertions, deletions and/or replacements that alter the sequence without altering or without substantially altering the function of the encoded amino acid sequence.

[0110] The function of a SARS-COV-2 amino acid sequence encoded by ORF7a as well as ORF7a sequences and mutations thereof are known in the art (see e.g. Yashvardhini, Niti, et al., 2021, Biomedical Research and Therapy 8.8:4497-4504.) In some embodiments, the secondary nucleic acid sequence part encoding an amino acid sequence having the function of ORF7a is a sequence encoding SEQ ID NO: 7 or a sequence having at least 90%, having at least 91%, having at least 92%, having at least 93%, having at least 94%, having at least 95%, at least 96%, at least 97%, at least 98%, at least 99%, at least 99.1%, at least 99.2%, at least 99.3%, at least 99.4%, at least 99.5%, at least 99.6%, at least 99.7%, at least 99.8%, or at least 99.9% sequence identity to the sequence encoding SEQ ID NO: 7. In some embodiments, the secondary nucleic acid sequence part encoding an amino acid sequence having the function of ORF7a is a sequence as defined by SEQ ID NO: 19 having at least 90%, having at least 91%, having at least 92%, having at least 93%, having at least 94%, having at least 95%, at least 96%, at least 97%, at least 98%, at least 99%, at least 99.1%, at least 99.2%, at least 99.3%, at least 99.4%, at least 99.5%, at least 99.6%, at least 99.7%, at least 99.8%, or at least 99.9% sequence identity to SEQ ID NO: 19. Such % sequence variation can for example derive from one or more mutations described in Yashvardhini, Niti, et al., 2021, Biomedical Research and Therapy 8.8:4497-4504 or from insertions, deletions and/or replacements, preferably conservative insertions, deletions and/or replacements that alter the sequence without altering or without substantially altering the function of the encoded amino acid sequence.

[0111] The function of a SARS-COV-2 amino acid sequence encoded by ORF7b as well as ORF7b sequences and mutations thereof are known in the art (see e.g. Hassan, Sk Sarif, Pabitra Pal Choudhury, and Bidyut Roy, 2021, Meta Gene 28:100873.) In some embodiments, the secondary nucleic acid sequence part encoding an amino acid sequence having the function of ORF7b is a sequence encoding SEQ ID NO: 8 or a sequence having at least 90%, having at least 91%, having at least 92%, having at least 93%, having at least 94%, having at least 95%, at least 96%, at least 97%, at least 98%, at least 99%, at least 99.1%, at least 99.2%, at least 99.3%, at least 99.4%, at least 99.5%, at least 99.6%, at least 99.7%, at least 99.8%, or at least 99.9% sequence identity to the sequence encoding SEQ ID NO: 8. In some embodiments, the secondary nucleic acid sequence part encoding an amino acid sequence having the function of ORF7b is a sequence as defined by SEQ ID NO: 20 having at least 90%, having at least 91%, having at least 92%, having at least 93%, having at least 94%, having at least 95%, at least 96%, at least 97%, at least 98%, at least 99%, at least 99.1%, at least 99.2%, at least 99.3%, at least 99.4%, at least 99.5%, at least 99.6%, at least 99.7%, at least 99.8%, or at least 99.9% sequence identity to SEQ ID NO: 20. Such % sequence variation can for example derive from one or more mutations described in Hassan, Sk Sarif, Pabitra Pal Choudhury, and Bidyut Roy, 2021, Meta Gene 28:100873 or from insertions, deletions and/or replacements, preferably conservative insertions, deletions and/or replacements that alter the sequence without altering or without substantially altering the function of the encoded amino acid sequence.

[0112] The function of a SARS-COV-2 amino acid sequence encoded by ORF8 as well as ORF8 sequences and mutations thereof are known in the art (see e.g. Badua, Christian Luke DC, Karol Ann T. Baldo, and Paul Mark B. Medina., 2021, Journal of medical virology 93.3:1702-1721; Hassan, Sk Sarif, et al., 2021, Computers in biology and medicine 133:104380.) In some embodiments, the secondary nucleic acid sequence part encoding an amino acid sequence having the function of ORF8 is a sequence encoding SEQ ID NO: 9 or a sequence having at least 90%, having at least 91%, having at least 92%, having at least 93%, having at least 94%, having at least 95%, at least 96%, at least 97%, at least 98%, at least 99%, at least 99.1%, at least 99.2%, at least 99.3%, at least 99.4%, at least 99.5%, at least 99.6%, at least 99.7%, at least 99.8%, or at least 99.9% sequence identity to the sequence encoding SEQ ID NO: 9. In some embodiments, the secondary nucleic acid sequence part encoding an amino acid sequence having the function of ORF8 is a sequence as defined by SEQ ID NO: 21 having at least 90%, having at least 91%, having at least 92%, having at least 93%, having at least 94%, having at least 95%, at least 96%, at least 97%, at least 98%, at least 99%, at least 99.1%, at least 99.2%, at least 99.3%, at least 99.4%, at least 99.5%, at least 99.6%, at least 99.7%, at least 99.8%, or at least 99.9% sequence identity to SEQ ID NO: 21. Such % sequence variation can for example derive from one or more mutations described in Badua, Christian Luke DC, Karol Ann T. Baldo, and Paul Mark B. Medina., 2021, Journal of medical virology 93.3:1702-1721 or from insertions, deletions and/or replacements, preferably conservative insertions, deletions and/or replacements that alter the sequence without altering or without substantially altering the function of the encoded amino acid sequence.

[0113] In some embodiments, the invention relates to a nucleic acid sequence described herein, wherein a) comprises two primary nucleic acid sequence parts, wherein one primary nucleic acid sequence part encodes SEQ ID NO: 1 (SARS-COV-2 N) or an amino acid sequence with at least 90%, at least 91%, at least 92%, at least 93%, at least 94%, at least 95%, at least 96%, at least 97%, at least 98%, or at least 99% sequence identity thereof; and wherein one primary nucleic acid sequence part encodes SEQ ID NO: 2 (SARS-COV-2 S) or an amino acid sequence with at least 90%, at least 91%, at least 92%, at least 93%, at least 94%, at least 95%, at least 96%, at least 97%, at least 98%, or at least 99% sequence identity thereof.

[0114] In some embodiments, the invention relates to a nucleic acid sequence described herein, wherein a) comprises two primary nucleic acid sequence parts, wherein one primary nucleic acid sequence part encodes SEQ ID NO: 1 (SARS-COV-2 N) or an amino acid sequence with at least 90%, at least 91%, at least 92%, at least 93%, at least 94%, at least 95%, at least 96%, at least 97%, at least 98%, or at least 99% sequence identity thereof; and wherein one primary nucleic acid sequence part encodes SEQ ID NO: 3 (SARS-COV-2 E) or an amino acid sequence with at least 90%, at least 91%, at least 92%, at least 93%, at least 94%, at least 95%, at least 96%, at least 97%, at least 98%, or at least 99% sequence identity thereof.

[0115] In some embodiments, the invention relates to a nucleic acid sequence described herein, wherein a) comprises two primary nucleic acid sequence parts, wherein one primary nucleic acid sequence part encodes SEQ ID NO: 1 (SARS-COV-2 N) or an amino acid sequence with at least 90%, at least 91%, at least 92%, at least 93%, at least 94%, at least 95%, at least 96%, at least 97%, at least 98%, or at least 99% sequence identity thereof; and wherein one primary nucleic acid sequence part encodes SEQ ID NO: 4 (SARS-COV-2 M) or an amino acid sequence with at least 90%, at least 91%, at least 92%, at least 93%, at least 94%, at least 95%, at least 96%, at least 97%, at least 98%, or at least 99% sequence identity thereof.

[0116] In some embodiments, the invention relates to a nucleic acid sequence described herein, wherein a) comprises two primary nucleic acid sequence parts, wherein one primary nucleic acid sequence part encodes SEQ ID NO: 2 (SARS-COV-2 S) or an amino acid sequence with at least 90%, at least 91%, at least 92%, at least 93%, at least 94%, at least 95%, at least 96%, at least 97%, at least 98%, or at least 99% sequence identity thereof; and wherein one primary nucleic acid sequence part encodes SEQ ID NO: 3 (SARS-COV-2 E) or an amino acid sequence with at least 90%, at least 91%, at least 92%, at least 93%, at least 94%, at least 95%, at least 96%, at least 97%, at least 98%, or at least 99% sequence identity thereof.

[0117] In some embodiments, the invention relates to a nucleic acid sequence described herein, wherein a) comprises two primary nucleic acid sequence parts, wherein one primary nucleic acid sequence part encodes SEQ ID NO: 2 (SARS-COV-2 S) or an amino acid sequence with at least 90%, at least 91%, at least 92%, at least 93%, at least 94%, at least 95%, at least 96%, at least 97%, at least 98%, or at least 99% sequence identity thereof; and wherein one primary nucleic acid sequence part encodes SEQ ID NO: 4 (SARS-COV-2 M) or an amino acid sequence with at least 90%, at least 91%, at least 92%, at least 93%, at least 94%, at least 95%, at least 96%, at least 97%, at least 98%, or at least 99% sequence identity thereof.

[0118] In some embodiments, the invention relates to a nucleic acid sequence described herein, wherein a) comprises two primary nucleic acid sequence parts, wherein one primary nucleic acid sequence part encodes SEQ ID NO: 3 (SARS-COV-2 E) or an amino acid sequence with at least 90%, at least 91%, at least 92%, at least 93%, at least 94%, at least 95%, at least 96%, at least 97%, at least 98%, or at least 99% sequence identity thereof; and wherein one primary nucleic acid sequence part encodes SEQ ID NO: 4 (SARS-COV-2 M) or an amino acid sequence with at least 90%, at least 91%, at least 92%, at least 93%, at least 94%, at least 95%, at least 96%, at least 97%, at least 98%, or at least 99% sequence identity thereof.

[0119] The nucleic acid according to the invention allows to significantly accelerate the production of a virus, virus part and/or virus particle that can be used for example in research or in a pharmaceutical composition such as a vaccine. These the mentioned vaccines and leads to well-defined vaccines which are very specific to a virus or a variant thereof, especially to the coronavirus SARS-COV-2.

[0120] The resulting sequence-defined genome is produced by PCR-driven molecular biology techniques, which allow to introduce deletions of genes and regulatory elements, which the virus needs for its genetic reproduction and replication.

[0121] The intended deletions can be designed in a way that they do not retain any sequence-overlap with those plasmids, in which the respective viral genes are expressed inside the producer cell line.

[0122] The nucleic acid according to the invention differs from fully-synthetic sequences produced by chemical synthesis and allows the biologic production of the nucleic acid by means of molecular biology techniques.

[0123] The fact that the protein components can be produced using common expression systems used for protein expression means that vaccines can be made available in large quantities very quickly. This is of crucial importance for viruses such as the coronavirus SARS-COV-2, whose spread has assumed the proportions of a pandemic and whose containment, therefore, requires widespread vaccine administration.

[0124] The invention provides a combinatoric approach wherein certain deletions, omissions or dysfunctions enable the efficient production of replication-limited virus particles with high antigenicity. In some embodiments the primary nucleic acid sequence part that encodes for SARS-COV-2 E is deleted, dysfunction or not present in the nucleic acid sequence of the invention. Therefore, the inventors found that certain sequence parts of the SARS-COV-2 genome (or sequences having equivalent functions) can be combined or omitted for the efficient production of replication limited virus particles.

[0125] The inventors found that two or three primary nucleic sequence part as described herein are required for high antigenicity. These can be combined in any combination with the secondary nucleic acid sequence parts described herein. These combinations may comprise single or double deletions/dysfunction/omission of the secondary nucleic acid sequences.

[0126] Missing sequence parts may limit reproducibility and may be complemented in a production system to enable efficient production.

[0127] The inventors found, that the nucleic acid of the invention wherein the function of a SARS-COV-2 amino acid sequence encoded by ORF3a is deleted or not present and which does not include a primary nucleic acid sequence part that encodes for SARS-CoV-2 E, is particularly useful, if further sequence parts are not present, deleted or dysfunctional. Therefore, a triple (or more) deletion of encoding elements compared to the original SARS-COV-2 virus genome is more useful than a double deletion of ORF3a and E. In some embodiments, the nucleic acid of the invention comprises an ORF3a/E double deletion and a further deletion of the function selected from the group of ORF6 deletion, ORF8 deletion, ORF7a deletion, M deletion, S deletion and N deletion, when compared to the sequences encoded by SARS-COV-2.

[0128] The reproducibility of the nucleic acid sequence is reduced by omitting functional sequence parts that play a crucial role in virus reproduction. These parts can be omitted e.g. by not being synthesized, by being deleted or by being made dysfunctional. As such the SARS-COV-2 can be efficiently produced in specialized cells but have no or a limited ability to reproduce in other cells.

[0129] Immunity derived from infection with SARS-COV-2 has proven to provide more protection than immunity derived from SARS-COV-2 S protein mediated vaccination (see e.g., Gazit, Sivan, et al., 2021, medRxiv). The sequences encode a combination of structural proteins of the wild-type virus or proteins with equivalent functions thereof. This enables a broad range of epitopes available to the immune system including T-cell epitopes (see, e.g., Grifoni, A., et al., 2020, Cell, 181(7), 1489-1501). This broad range of epitopes may enable immunity against a broad range of virus variants in patients with or without pre-existing immunity.

[0130] Accordingly, the invention is at least in part based on the discovery that the nucleic acid of the invention, enables efficient production of a combination virus-like proteins with limited replication capabilities but similar antigenic effect to the original virus.

[0131] In certain embodiments, the invention relates to the nucleic acid sequence of the invention, wherein the nucleic acid sequence comprises two or three primary nucleic acid sequence parts, wherein a primary nucleic acid sequence part encodes an amino acid sequence selected from the group consisting of i) SEQ ID NO: 1 (SARS-COV-2 N) or an amino acid sequence with at least 90% sequence identity thereof; ii) SEQ ID NO: 2 (SARS-COV-2 S) or an amino acid sequence with at least 90% sequence identity thereof; and iii) SEQ ID NO: 3 (SARS-COV-2 E) or an amino acid sequence with at least 90% sequence identity thereof; and wherein the nucleic acid sequence has no sequence part that encodes an amino acid sequence having the function of a SARS-CoV-2 amino acid sequence encoded by SEQ ID NO: 4 (SARS-COV-2 M).

[0132] In certain embodiments, the invention relates to the nucleic acid sequence of the invention, wherein the nucleic acid sequence comprises three primary nucleic acid sequence parts: i) SEQ ID NO: 1 (SARS-COV-2 N) or an amino acid sequence with at least 90% sequence identity thereof; ii) SEQ ID NO: 2 (SARS-COV-2 S) or an amino acid sequence with at least 90% sequence identity thereof; and iii) SEQ ID NO: 3 (SARS-COV-2 E) or an amino acid sequence with at least 90% sequence identity thereof.

[0133] Therefore, nucleic acid sequence of the invention in this embodiment can comprise any other sequence part(s) or all other parts of the SARS-COV-2 genome but no sequence part encoding an amino acid sequence having the function of a SARS-COV-2 amino acid sequence encoded by SEQ ID NO: 4 (SARS-COV-2 M). For example, sequence having the function of a SARS-COV-2 amino acid sequence encoded by SEQ ID NO: 4 (SARS-COV-2 M) is not present, deleted, or dysfunctional.

[0134] In certain embodiments, the invention relates to the nucleic acid sequence of the invention, wherein the nucleic acid sequence comprises no nucleic acid sequence part encodes an amino acid sequence having the function of a SARS-COV-2 amino acid sequence encoded by ORF7 and ORF8.

[0135] Therefore, nucleic acid sequence of the invention in this embodiment can comprise any other sequence part(s) or all other parts of the SARS-COV-2 genome but no sequence part encoding an amino acid sequence having the function of a SARS-COV-2 amino acid sequence encoded by SEQ ID NO: 4 (SARS-COV-2 M), ORF7 and/or ORF8. For example, sequence having the function of a SARS-COV-2 amino acid sequence encoded by SEQ ID NO: 4 (SARS-COV-2 M), ORF7 and ORF8 are not present, deleted, dysfunctional or a combination thereof (e.g. SEQ ID NO: 4 (SARS-CoV-2 M) not present and ORF7 and ORF8 dysfunctional).

[0136] In certain embodiments, the invention relates to the nucleic acid sequence of the invention, wherein the nucleic acid sequence comprises no nucleic acid sequence part encodes an amino acid sequence having the function of a SARS-COV-2 amino acid sequence encoded by ORF6 and ORF7ab.

[0137] Therefore, nucleic acid sequence of the invention in this embodiment can comprise any other sequence part(s) or all other parts of the SARS-COV-2 genome but no sequence part encoding an amino acid sequence having the function of a SARS-COV-2 amino acid sequence encoded by SEQ ID NO: 4 (SARS-COV-2 M), ORF6 and/or ORF7ab. For example, sequence having the function of a SARS-COV-2 amino acid sequence encoded by SEQ ID NO: 4 (SARS-COV-2 M), ORF6 and ORF7ab are not present, deleted, dysfunctional or a combination thereof (e.g. SEQ ID NO: 4 (SARS-CoV-2 M) not present and ORF6 and ORF7ab dysfunctional).

[0138] In certain embodiments, the invention relates to the nucleic acid sequence of the invention, wherein the nucleic acid sequence comprises no nucleic acid sequence part encodes an amino acid sequence having the function of a SARS-COV-2 amino acid sequence encoded by ORF6, ORF7ab and ORF8.

[0139] Therefore, nucleic acid sequence of the invention in this embodiment can comprise any other sequence part(s) or all other parts of the SARS-COV-2 genome but no sequence part encoding an amino acid sequence having the function of a SARS-COV-2 amino acid sequence encoded by SEQ ID NO: 4 (SARS-COV-2 M), ORF6, ORF7ab and/or ORF8. For example, a sequence having the function of a SARS-COV-2 amino acid sequence encoded by SEQ ID NO: 4 (SARS-COV-2 M), ORF6, ORF7ab and ORF8 are not present, deleted, dysfunctional or a combination thereof (e.g. SEQ ID NO: 4 (SARS-COV-2 M) not present and ORF6, ORF7ab and ORF8 dysfunctional).

[0140] In certain embodiments, the invention relates to the nucleic acid sequence of the invention, wherein the nucleic acid sequence comprises a primary nucleic acid sequence part encoding an amino acid sequence as defined by SEQ ID NO: 1 (SARS-CoV-2 N) (or an amino acid sequence with at least 90% sequence identity thereof), a secondary nucleic acid sequence part encoding an amino acid sequence having the function of a SARS-COV-2 amino acid sequence encoded by ORF3a and a sequence part of the nucleic acid sequence located between said primary nucleic acid sequence part and said secondary nucleic acid sequence part, wherein the sequence part comprises I) SEQ ID NO: 35 or a sequence having at least 90% sequence identity to SEQ ID NO: 35.

[0141] In certain embodiments, the invention relates to the nucleic acid sequence of the invention, wherein the nucleic acid sequence comprises a primary nucleic acid sequence part encoding an amino acid sequence as defined by SEQ ID NO: 1 (SARS-CoV-2 N) (or an amino acid sequence with at least 90% sequence identity thereof), a secondary nucleic acid sequence part encoding an amino acid sequence having the function of a SARS-COV-2 amino acid sequence encoded by ORF3a and a sequence part of the nucleic acid sequence located between said primary nucleic acid sequence part and said secondary nucleic acid sequence part, wherein the sequence part comprises II) SEQ ID NO: 36 or a sequence having at least 90% sequence identity to SEQ ID NO: 36.

[0142] In certain embodiments, the invention relates to the nucleic acid sequence of the invention, wherein the nucleic acid sequence comprises a primary nucleic acid sequence part encoding an amino acid sequence as defined by SEQ ID NO: 1 (SARS-CoV-2 N) (or an amino acid sequence with at least 90% sequence identity thereof), a secondary nucleic acid sequence part encoding an amino acid sequence having the function of a SARS-COV-2 amino acid sequence encoded by ORF3a and a sequence part the nucleic acid sequence located between said primary nucleic acid sequence part and said secondary nucleic acid sequence part, wherein the sequence part comprises III) SEQ ID NO:37 or a sequence having at least 90% sequence identity to SEQ ID NO: 37.

[0143] In certain embodiments, the invention relates to a biologically produced nucleic acid sequence comprising two or three nucleic acid sequence parts encoding an amino acid sequence selected from the group consisting of: i) SEQ ID NO: 1 (SARS-COV-2 N) or an amino acid sequence with at least 90% sequence identity thereof; ii) SEQ ID NO: 2 (SARS-COV-2 S) or an amino acid sequence with at least 90% sequence identity thereof; and iii) SEQ ID NO: 3 (SARS-COV-2 E) or an amino acid sequence with at least 90% sequence identity thereof; and wherein the nucleic acid sequence has no sequence part that encodes an amino acid sequence having the function of a SARS-CoV-2 amino acid sequence encoded by SEQ ID NO: 4 (SARS-COV-2 M).

[0144] In certain embodiments, the invention relates to the nucleic acid sequence of the invention, wherein the nucleic acid sequence comprises a sequence as defined by SEQ ID NO: 33. For example a sequence as defined by SEQ ID NO: 33 that is located between a nucleic acid sequence part encoding an amino acid sequence as defined by SEQ ID NO: 1 (SARS-COV-2 N) (or an amino acid sequence with at least 90% sequence identity thereof) and a nucleic acid sequence part encoding an amino acid sequence having the function of a SARS-COV-2 amino acid sequence encoded by ORF3a.

[0145] In certain embodiments, the invention relates to the nucleic acid sequence of the invention, wherein the nucleic acid sequence comprises two primary nucleic acid sequence parts: i) SEQ ID NO: 1 (SARS-COV-2 N) or an amino acid sequence with at least 90% sequence identity thereof; and ii) SEQ ID NO: 2 (SARS-COV-2 S) or an amino acid sequence with at least 90% sequence identity thereof; and wherein the nucleic acid sequence has no sequence part that encodes an amino acid sequence having the function of a SARS-COV-2 amino acid sequence encoded by SEQ ID NO: 4 (SARS-COV-2 M) and SEQ ID NO: 3 (SARS-COV-2 E).

[0146] In certain embodiments, the invention relates to the nucleic acid sequence of the invention, wherein the nucleic acid sequence comprises a sequence as defined by SEQ ID NO: 34. Such a sequence is, for example, a sequence as defined by SEQ ID NO: 34 that is located between a nucleic acid sequence part encoding an amino acid sequence as defined by SEQ ID NO: 1 (SARS-COV-2 N) (or an amino acid sequence with at least 90% sequence identity thereof) and a nucleic acid sequence part encoding an amino acid sequence having the function of a SARS-COV-2 amino acid sequence encoded by ORF3a. In certain embodiments, the invention relates to the nucleic acid sequence of the invention, wherein the nucleic acid sequence comprises a sequence as defined by SEQ ID NO: 35. Such a sequence is, for example, a sequence as defined by SEQ ID NO: 35 that is located between a nucleic acid sequence part encoding an amino acid sequence as defined by SEQ ID NO: 1 (SARS-COV-2 N) (or an amino acid sequence with at least 90% sequence identity thereof) and a nucleic acid sequence part encoding an amino acid sequence having the function of a SARS-COV-2 amino acid sequence encoded by ORF3a.

[0147] In certain embodiments, the invention relates to the nucleic acid sequence of the invention, wherein the nucleic acid sequence comprises a sequence as defined by SEQ ID NO: 36. Such a sequence is, for example, a sequence as defined by SEQ ID NO: 36 that is located between a nucleic acid sequence part encoding an amino acid sequence as defined by SEQ ID NO: 1 (SARS-COV-2 N) (or an amino acid sequence with at least 90% sequence identity thereof) and a nucleic acid sequence part encoding an amino acid sequence having the function of a SARS-COV-2 amino acid sequence encoded by ORF3a.

[0148] In certain embodiments, the invention relates to the nucleic acid sequence of the invention, wherein the nucleic acid sequence comprises a sequence as defined by SEQ ID NO: 37. Such a sequence is, for example, a sequence as defined by SEQ ID NO: 37 that is located between a nucleic acid sequence part encoding an amino acid sequence as defined by SEQ ID NO: 1 (SARS-COV-2 N) (or an amino acid sequence with at least 90% sequence identity thereof) and a nucleic acid sequence part encoding an amino acid sequence having the function of a SARS-COV-2 amino acid sequence encoded by ORF3a.

[0149] In certain embodiments, the invention relates to the nucleic acid sequence of the invention, wherein the nucleic acid sequence comprises a sequence as defined by SEQ ID NO: 66. Such a sequence is, for example, a sequence as defined by SEQ ID NO: 66 that is located between a nucleic acid sequence part encoding an amino acid sequence as defined by SEQ ID NO: 1 (SARS-COV-2 N) (or an amino acid sequence with at least 90% sequence identity thereof) and a nucleic acid sequence part encoding an amino acid sequence having the function of a SARS-COV-2 amino acid sequence encoded by ORF3a.

[0150] In certain embodiments, the invention relates to the nucleic acid sequence of the invention, wherein the nucleic acid sequence comprises a sequence as defined by SEQ ID NO: 67. Such a sequence is, for example, a sequence as defined by SEQ ID NO: 67 that is located between a nucleic acid sequence part encoding an amino acid sequence as defined by SEQ ID NO: 1 (SARS-COV-2 N) (or an amino acid sequence with at least 90% sequence identity thereof) and a nucleic acid sequence part encoding an amino acid sequence having the function of a SARS-COV-2 amino acid sequence encoded by ORF3a.

[0151] The person skilled in the art is aware that the sequence parts as defined by SEQ ID NO: 34-37 are typically located between the sequence parts described herein, wherein further parts of the sequence correspond to a SARS-COV-2 genome or a SARS-COV-2 variant thereof. As such the SEQ ID NO: 34-37 provide a way to introduce deletions in the SARS-COV-2 genome. Further deletions, insertions and/or replacements may be introduced in the adjacent sequence parts and/or in the further parts of the sequence.

[0152] The inventors demonstrated that, after multiple cell passages of AM, AEAM, AMAORF7AORF8, AMAORF6AORF7ab and/or AMAORF6AORF7AORF8 viruses (see Example 9) in a genetically engineered producer cell authentic sequence can be retained. Furthermore, the inventors showed that in several parallel infections of the vaccine viruses and after multiple blind-passages on VeroE6 cells, no viable virus emerges and already after the first passage no replicative virus can be demonstrated in normal, SARS-COV-2 susceptible cells. The inventors furthermore demonstrated that sequential passages in permissive producer cells, the population of offspring vaccine virus is found to be well conserved.

[0153] Accordingly, the invention is at least in part based on the finding that the nucleic acid described herein can encode a virus with a low chance of spontaneous change during virus propagation in cell culture in the producer cells, while being unlikely to re-generate infectious, replication-competent wild-type or wild-type-like SARS-COV-2. As such the nucleic acid described herein enables safe production of a SARS-COV-2-like antigens and/or vaccines.

[0154] In certain embodiments, the invention relates to the nucleic acid sequence of the invention, wherein for the secondary nucleic acid sequence part encoding an amino acid sequence having the function of a SARS-COV-2 amino acid sequence ORF3a is a sequence defined by SEQ ID NO: 5 or a sequence having with at least 90%, at least 91%, at least 92%, at least 93%, at least 94%, at least 95%, at least 96%, at least 97%, at least 98%, or at least 99% sequence identity thereof, that retains the function of a SARS-COV-2 amino acid sequence encoded by ORF3a.

[0155] In certain embodiments, the invention relates to the nucleic acid sequence of the invention, wherein for the secondary nucleic acid sequence part encoding an amino acid sequence having the function of a SARS-COV-2 amino acid sequence ORF6 is a sequence defined by SEQ ID NO: 6 or a sequence having with at least 90%, at least 91%, at least 92%, at least 93%, at least 94%, at least 95%, at least 96%, at least 97%, at least 98%, or at least 99% sequence identity thereof, that retains the function of a SARS-COV-2 amino acid sequence encoded by ORF6.

[0156] In certain embodiments, the invention relates to the nucleic acid sequence of the invention, wherein for the secondary nucleic acid sequence part encoding an amino acid sequence having the function of a SARS-COV-2 amino acid sequence ORF7a is a sequence defined by SEQ ID NO: 7 or a sequence having with at least 90%, at least 91%, at least 92%, at least 93%, at least 94%, at least 95%, at least 96%, at least 97%, at least 98%, or at least 99% sequence identity thereof, that retains the function of a SARS-COV-2 amino acid sequence encoded by ORF7a.

[0157] In certain embodiments, the invention relates to the nucleic acid sequence of the invention, wherein for the secondary nucleic acid sequence part encoding an amino acid sequence having the function of a SARS-COV-2 amino acid sequence ORF7b is a sequence defined by SEQ ID NO: 8 or a sequence having with at least 90%, at least 91%, at least 92%, at least 93%, at least 94%, at least 95%, at least 96%, at least 97%, at least 98%, or at least 99% sequence identity thereof, that retains the function of a SARS-COV-2 amino acid sequence encoded by ORF7b.

[0158] In certain embodiments, the invention relates to the nucleic acid sequence of the invention, wherein for the secondary nucleic acid sequence part encoding an amino acid sequence having the function of a SARS-COV-2 amino acid sequence ORF8 is a sequence defined by SEQ ID NO: 9 or a sequence having with at least 90%, at least 91%, at least 92%, at least 93%, at least 94%, at least 95%, at least 96%, at least 97%, at least 98%, or at least 99% sequence identity thereof, that retains the function of a SARS-COV-2 amino acid sequence encoded by ORF8.

[0159] In certain embodiments, the invention relates to the nucleic acid sequence of the invention, wherein for the secondary nucleic acid sequence part encoding an amino acid sequence having the function of a SARS-COV-2 amino acid sequence i) ORF3a is a sequence defined by SEQ ID NO: 5; ii) ORF6 is a sequence defined by SEQ ID NO: 6; iii) ORF7a is a sequence defined by SEQ ID NO: 7; and/or iv) ORF8 is a sequence defined by SEQ ID NO: 9.

[0160] The inventors found, that ORFs largely identical to the sequences of the SARS-COV-2 enable efficient production of SARS-COV-2 proteins.

[0161] Accordingly, the invention is at least in part based on the finding that SARS-COV-2 proteins can be produced efficiently, as described herein.

[0162] In certain embodiments, the invention relates to the nucleic acid sequence of the invention, wherein the nucleic acid sequence comprises three primary nucleic acid sequence parts.

[0163] In some embodiments, the invention relates to a nucleic acid sequence described herein, wherein a) comprises three primary nucleic acid sequence parts, wherein one primary nucleic acid sequence part encodes SEQ ID NO: 1 (SARS-COV-2 N) or an amino acid sequence with at least 90%, at least 91%, at least 92%, at least 93%, at least 94%, at least 95%, at least 96%, at least 97%, at least 98%, or at least 99% sequence identity thereof; wherein one primary nucleic acid sequence part encodes SEQ ID NO: 2 (SARS-COV-2 S) or an amino acid sequence with at least 90%, at least 91%, at least 92%, at least 93%, at least 94%, at least 95%, at least 96%, at least 97%, at least 98%, or at least 99% sequence identity thereof; and wherein one primary nucleic acid sequence part encodes SEQ ID NO: 3 (SARS-COV-2 E) or an amino acid sequence with at least 90%, at least 91%, at least 92%, at least 93%, at least 94%, at least 95%, at least 96%, at least 97%, at least 98%, or at least 99% sequence identity thereof.

[0164] In some embodiments, the invention relates to a nucleic acid sequence described herein, wherein a) comprises three primary nucleic acid sequence parts, wherein one primary nucleic acid sequence part encodes SEQ ID NO: 1 (SARS-COV-2 N) or an amino acid sequence with at least 90%, at least 91%, at least 92%, at least 93%, at least 94%, at least 95%, at least 96%, at least 97%, at least 98%, or at least 99% sequence identity thereof; wherein one primary nucleic acid sequence part encodes SEQ ID NO: 2 (SARS-COV-2 S) or an amino acid sequence with at least 90%, at least 91%, at least 92%, at least 93%, at least 94%, at least 95%, at least 96%, at least 97%, at least 98%, or at least 99% sequence identity thereof; and wherein one primary nucleic acid sequence part encodes SEQ ID NO: 4 (SARS-COV-2 M) or an amino acid sequence with at least 90%, at least 91%, at least 92%, at least 93%, at least 94%, at least 95%, at least 96%, at least 97%, at least 98%, or at least 99% sequence identity thereof.

[0165] In some embodiments, the invention relates to a nucleic acid sequence described herein, wherein a) comprises three primary nucleic acid sequence parts, wherein one primary nucleic acid sequence part encodes SEQ ID NO: 1 (SARS-COV-2 N) or an amino acid sequence with at least 90%, at least 91%, at least 92%, at least 93%, at least 94%, at least 95%, at least 96%, at least 97%, at least 98%, or at least 99% sequence identity thereof; wherein one primary nucleic acid sequence part encodes SEQ ID NO: 3 (SARS-COV-2 E) or an amino acid sequence with at least 90%, at least 91%, at least 92%, at least 93%, at least 94%, at least 95%, at least 96%, at least 97%, at least 98%, or at least 99% sequence identity thereof; and wherein one primary nucleic acid sequence part encodes SEQ ID NO: 4 (SARS-COV-2 M) or an amino acid sequence with at least 90%, at least 91%, at least 92%, at least 93%, at least 94%, at least 95%, at least 96%, at least 97%, at least 98%, or at least 99% sequence identity thereof.

[0166] In some embodiments, the invention relates to a nucleic acid sequence described herein, wherein a) comprises three primary nucleic acid sequence parts, wherein one primary nucleic acid sequence part encodes SEQ ID NO: 2 (SARS-COV-2 S) or an amino acid sequence with at least 90%, at least 91%, at least 92%, at least 93%, at least 94%, at least 95%, at least 96%, at least 97%, at least 98%, or at least 99% sequence identity thereof; wherein one primary nucleic acid sequence part encodes SEQ ID NO: 3 (SARS-COV-2 E) or an amino acid sequence with at least 90%, at least 91%, at least 92%, at least 93%, at least 94%, at least 95%, at least 96%, at least 97%, at least 98%, or at least 99% sequence identity thereof; and wherein one primary nucleic acid sequence part encodes SEQ ID NO: 4 (SARS-COV-2 M) or an amino acid sequence with at least 90%, at least 91%, at least 92%, at least 93%, at least 94%, at least 95%, at least 96%, at least 97%, at least 98%, or at least 99% sequence identity thereof.

[0167] Therefore, in some embodiments, the sequences encode a combination of three structural proteins of the wild-type virus or proteins with equivalent functions thereof. This enables a broad range of epitopes available to the immune system including T-cell epitopes (see, e.g., Grifoni, A., et al., 2020, Cell, 181 (7), 1489-1501). This broad range of epitopes may enable immunity against a broad range of virus variants in patients with or without pre-existing immunity.

[0168] Accordingly, the invention is at least in part based on the discovery that the nucleic acid of the invention, enables efficient production of a combination virus-like proteins with limited replication capabilities but similar antigenic effect to the original virus.

[0169] In certain embodiments, the invention relates to the nucleic acid sequence of any one of the invention, wherein one of the secondary nucleic acid sequence parts encodes an amino acid sequence having the function of a SARS-COV-2 amino acid sequence encoded by ORF3a.

[0170] In certain embodiments, the invention relates to the nucleic acid sequence of any one of the invention, wherein one of the secondary nucleic acid sequence parts encodes an amino acid sequence having the function of a SARS-COV-2 amino acid sequence encoded by ORF3a and one of the secondary nucleic acid sequence parts encodes an amino acid sequence having the function of a SARS-COV-2 amino acid sequence encoded by ORF7b.

[0171] The inventors found, that ORF3a facilitates production of SARS-COV-2 proteins that can be used in a vaccine.

[0172] Accordingly, the invention is at least in part based on the finding that ORF3a contributes to the production of SARS-COV-2 proteins as described herein.

[0173] In certain embodiments, the invention relates to the nucleic acid sequence of any one of the invention, wherein the primary nucleic acid sequence parts and the secondary nucleic acid sequence parts are ordered in 5′ to 3′ direction in the following order:
[0174] 1. SEQ ID NO: 2 (SARS-COV-2 S) or an amino acid sequence with at least 90%, at least 91%, at least 92%, at least 93%, at least 94%, at least 95%, at least 96%, at least 97%, at least 98%, or at least 99% sequence identity thereof,
[0175] 2. nucleic acid sequence part encoding an amino acid sequence having the function of a SARS-COV-2 amino acid sequence encoded by ORF3a;
[0176] 3. SEQ ID NO: 3 (SARS-COV-2 E) or an amino acid sequence with at least 90%, at least 91%, at least 92%, at least 93%, at least 94%, at least 95%, at least 96%, at least 97%, at least 98%, or at least 99% sequence identity thereof,
[0177] 4. SEQ ID NO: 4 (SARS-COV-2 M) or an amino acid sequence with at least 90%, at least 91%, at least 92%, at least 93%, at least 94%, at least 95%, at least 96%, at least 97%, at least 98%, or at least 99% sequence identity thereof,
[0178] 5. nucleic acid sequence part encoding an amino acid sequence having the function of a SARS-COV-2 amino acid sequence encoded by ORF6,
[0179] 6. nucleic acid sequence part encoding an amino acid sequence having the function of a SARS-COV-2 amino acid sequence encoded by ORF7a,
[0180] 7. nucleic acid sequence part encoding an amino acid sequence encoding an amino acid sequence having the function of a SARS-COV-2 amino acid sequence encoded by ORF8,
[0181] 8. SEQ ID NO: 1 (SARS-COV-2 N) or an amino acid sequence with at least 90%, at least 91%, at least 92%, at least 93%, at least 94%, at least 95%, at least 96%, at least 97%, at least 98%, or at least 99% sequence identity thereof.

[0182] The inventors found that the sequences described herein can be expressed particularly effective, if the order of the sequence parts corresponds to the original order of the SARS-COV-2 genome sequence. As such, the order can shift to the next corresponding sequence, if one or more of the sequence parts 1. -9. is not present, deleted, or dysfunctional. Furthermore, the sequence parts do not need to be directly linked, but may also have other sequences in between or overlapping sequence parts. The order described herein may be considered as having a later starting point than in 5′ to 3′ direction, if the order number is higher.

[0183] Accordingly, the invention is at least in part based on the finding that the nucleic acid can be particularly efficiently expressed if the sequence parts are ordered as described herein.

[0184] In some embodiments, the nucleic acid sequence of the invention comprises further sequence parts e.g. SARS-COV-2 sequence parts such as ORF1a, ORF1b, ORF1ab and/or ORF10.

[0185] In certain embodiments, the invention relates to the nucleic acid sequence of any one of the invention, wherein the nucleic acid sequence comprises a nucleic acid sequence defined by the SEQ ID NO: 10 (SARS-COV-2 genome) or a sequence with at least 90%, at least 91%, at least 92%, at least 93%, at least 94%, at least 95%, at least 96%, at least 97%, at least 98%, or at least 99% sequence identity thereof with a deletion and/or a dysfunctionality of the E gene, ORF6 gene and ORF8 gene.

[0186] In certain embodiments, the invention relates to the nucleic acid sequence of any one of the invention, wherein the nucleic acid sequence comprises a nucleic acid sequence defined by the SEQ ID NO: 10 (SARS-COV-2 genome) or a sequence with at least 90%, at least 91%, at least 92%, at least 93%, at least 94%, at least 95%, at least 96%, at least 97%, at least 98%, or at least 99% sequence identity thereof with a deletion and/or a dysfunctionality of the E gene, ORF6 gene, ORF7a gene and ORF8 gene.

[0187] The term “E gene”, as used herein, refers to a nucleic sequence encoding for SEQ ID NO: 15.

[0188] The term “ORF6 gene”, as used herein, refers to a nucleic sequence encoding for SEQ ID NO: 6.

[0189] The term “ORF7a gene”, as used herein, refers to a nucleic sequence encoding for SEQ ID NO: 7.

[0190] The term “ORF8 gene”, as used herein, refers to a nucleic sequence encoding for SEQ ID NO: 9.

[0191] The inventors found that the E-gene, ORF6 gene, ORF7a and/or ORF8 gene can be removed and at least partially replaced by trans-complementary producer cells. This enables efficient and safe production of replication-limited virus particles.

[0192] Accordingly, the invention is at least in part based on the finding that removing the functionality of the E-gene, ORF6 gene, ORF7a and/or ORF8 gene is particularly useful in the production of replication-limited virus particles.

[0193] In certain embodiments, the invention relates to a vector comprising the nucleic acid sequence of one of the invention.

[0194] The term “vector”, as used herein, refers to a nucleic acid molecule, capable of transferring or transporting itself and/or another nucleic acid molecule into a cell. The transferred nucleic acid is generally linked to, i.e., inserted into, the vector nucleic acid molecule. A vector may include sequences that direct autonomous replication in a cell, or may include sequences sufficient to allow integration into host cell DNA. In some embodiments, the vector described herein is a vector selected from the group of plasmids (e.g., DNA plasmids or RNA plasmids), shuttle vectors, transposons, cosmids, artificial chromosomes (e.g. bacterial, yeast, human), and viral vectors. In some embodiments, the invention relates to a vector according to the invention, wherein the vector comprises at least one sequence encoding an T7 promoter and at least two untranslated regions that contain sequences that enable the synthesis of negative-strand RNA and/or that enable positive-strand RNA synthesis.

[0195] In certain embodiments, the invention relates to the vector of the invention, wherein the vector is a plasmid vector.

[0196] In some embodiments, the plasmid vector described herein has a selection marker and sequence determining the origin of replication.

[0197] The inventors found that plasmid vectors are particularly suitable for transferring large sequences as described herein.

[0198] Accordingly, the invention is at least in part based on the finding that plasmid vectors are particularly effective for transferring the nucleic acid sequence as described herein.

[0199] In certain embodiments, the invention relates to the vector of the invention, wherein the vector comprises a sequence as defined by SEQ ID NO: 11 (biologically produced vector with ORF7a gene) or a sequence having 90%, at least 91%, at least 92%, at least 93%, at least 94%, at least 95%, at least 96%, at least 97%, at least 98%, or at least 99% sequence identity thereof.

[0200] In certain embodiments, the invention relates to the vector of the invention, wherein the vector comprises a sequence as defined by SEQ ID NO: 12 (biologically produced vector without ORF7a gene) or a sequence having 90%, at least 91%, at least 92%, at least 93%, at least 94%, at least 95%, at least 96%, at least 97%, at least 98%, or at least 99% sequence identity thereof.

[0201] In some embodiments, the vector described herein is used in combination with at least one transfection enhancer, e.g., a transfection enhancer selected from the group of oligonucleotides, lipoplexes, polymersomes, polyplexes, dendrimers, inorganic nanoparticles and cell-penetrating peptides.

[0202] The vector described herein can be used for efficient transfer and/or amplification of the nucleic acid sequence of the invention in an amplifying host cell.

[0203] The product of the amplification in an amplifying host cell (e.g., yeast cells) may be isolated and subsequently translated in a further host cell (e.g., human cell).

[0204] Accordingly, the invention is at least in part based on the discovery that the vector described herein enables efficient amplification of the nucleic acids described herein and efficient production of a combination virus-like proteins with limited replication capabilities but high antigenicity. The inventive nucleic acids lead through the above procedure to the production of a dispersion comprising proteins and other building blocks.

[0205] Suitable separation methods known to the person skilled in the art, such as centrifugation or chromatography, can be used to separate these building blocks, if necessary also from residues of the production cell line used or other production aids or organisms, and thus purify them.

[0206] In some embodiments, the building blocks described herein are purified using at least one separation method selected from the group of chromatography, precipitation, ultracentrifugation, tangential-flow filtration, and enzymatic digestion

[0207] These optionally purified virus envelopes or fragments thereof represent the basis of the vaccine, which is then transferred into different dosage forms depending on the type of application.

[0208] Typically, an adjuvant is used for this purpose, stabilizers to improve shelf-life, salts and buffers. The vaccines are thus the product of the long-chain, fully synthetic nucleic acids described here.

[0209] In certain embodiments, the invention relates to a host cell comprising the nucleic acid sequence of the invention or the vector of the invention.

[0210] The term “host cell”, as used herein, refers to a cell into which exogenous nucleic acid has been introduced, including the progeny of such a cell. Host cells include “transformants” and “transformed cells,” which include the primary transformed cell and progeny derived therefrom without regard to the number of passages. Progeny may not be completely identical in nucleic acid content to a parent cell but may contain mutations. Mutant progeny that have the same function or biological activity as screened or selected for in the originally transformed cell are included herein.

[0211] In some embodiments, the host cell described herein comprises a cell that allows viral entry of SARS-COV-2. In some embodiments, the host cell described herein comprises a cell that expresses the human ACE2 receptor or a functional human-like ACE2 receptor. The human-like ACE2 receptors that allow viral entry of SARS-COV-2 are known to the person skilled in the art (see, e.g., Damas, J., et al., 2020, Proceedings of the National Academy of Sciences, 117 (36), 22311-22322).

[0212] In some the host cell described herein comprises at least one cell type selected from the group of HEK293, MDCK, Chinese hamster ovary (CHO), SF9, Vero, MRC 5, Per.C6, PMK, and WI-38.

[0213] In some embodiments, the host cell described herein comprises a cell that is at least partially human or a cell of an at least partially human cell line.

[0214] In some embodiments, the host cell described herein comprises a cell that allows the production of a viral particle comprising the nucleotide of the invention or the vector of the invention that is selectively replicable in it is fully replicable in cells of the host cell but not or unsubstantially in cells of the human body. This selective replicability is achieved by cells that comprise complementary proteins for the replication of the viral particle.

[0215] In some embodiments, the host cell described herein comprises a cell that can express at least one protein for viral replication. In some embodiments, the host cell described herein comprises a cell that can express at least one protein component for viral replication that is not encoded in the nucleotide acid sequence of the invention or the vector of the invention.

[0216] Transduction of host cells by the vector of the invention can be achieved by stable or transient transduction (see, e.g., Stepanenko, A. A., and Heng, H. H., 2017, Mutation Research/Reviews in Mutation Research, 773, 91-103).

[0217] If DNA is introduced into the production unit according to a first embodiment, this is usually done using a plasmid suitable for this purpose.

[0218] Alternatively, the DNA may be introduced into the host cell by any kind of vector.

[0219] In certain embodiments, the invention relates to the host cell of the invention additionally comprising at least one complementary SARS-COV-2 sequence thereof.

[0220] The term “complementary SARS-COV-2 sequence”, as used herein, refers to a sequence having the function of a SARS-COV-2 protein, wherein the function is not comprised in the nucleic acid it complements. Therefore, the term “complementary” as used herein is not referring to the ability to form a double stranded structure, but rather refers to a nucleic acid sequence that encodes an additional a SARS-COV-2 protein or a protein with the function of an additional SARS-COV-2 protein.-For example, a sequence is complementary to the sequence as defined by SEQ ID NO: 12, if it comprises a nucleotide acid sequence encoding a functional SARS-COV-2 E, ORF6, ORF7a and/or ORF8 protein.

[0221] In some embodiments, the nucleic acid of the invention combined with all complementary sequences comprised in the host cell contain herein completes at least 2, at least 3, at least 4, at least 5, at least 6, at least 7, at least 8 at least 9 or all sequence parts selected from the group of ORF1a, ORF1b, S, ORF3a, E, M, ORF6, ORF7a, ORF8, N.

[0222] In certain embodiments, the invention relates to the host cell of the invention additionally comprising at least one nucleic acid sequence that a) is not comprised in the vector of the invention or the nucleic acid of the invention; and b) comprises at least one sequence part that encodes a function of a protein encoded in the SARS-COV-2 genome.

[0223] The sequence additionally comprised in the host cell may be added to the host cell by a separate vector such as a plasmid vector.

[0224] The inventors found that the nucleic sequences described herein can be used as part of a trans-complementary production system.

[0225] Accordingly, the invention is at least in part based on the finding that trans-complementary production enables production of complete or almost complete virus particles that remain self-reproduction limited.

[0226] In certain embodiments, the invention relates to a method of production of a virus envelope and/or a fragment of a virus envelope and/or virus envelope protein comprising culturing the host cell of the invention.

[0227] The term “virus envelope”, as used herein, refers to protein assembly such as a protein layer that has a stabilizing function for a nucleotide acid sequence (such as the nucleotide acid sequence of the invention). In some embodiments, the virus envelope described herein enables the assimilation of the nucleotide acid sequence of the invention into a human cell. In some embodiments, the virus envelope described herein comprises a spike protein, envelope protein and a membrane protein.

[0228] In some embodiments, the invention relates to a fragment of a virus envelope obtainable by gene expression using at least one nucleic acid according to the invention using the vector according to the invention, using the kit according to the invention, or the host cell according to the invention.

[0229] The term “fragment of a virus envelope”, as used herein, refers to at least two assembled proteins that form an incomplete virus envelope.

[0230] In some embodiments, the invention relates to a virus envelope protein obtainable by gene expression using at least one nucleic acid according to the invention using the vector according to the invention, using the kit according to the invention, or the host cell according to the invention.

[0231] The term “virus envelope protein”, as used herein, refers to at least one protein that can form part of a viral envelope.

[0232] In some embodiments, the invention relates to a virus envelope, a fragment of a virus envelope and/or virus envelope protein obtainable by gene expression using at least one nucleic acid according to the invention using the vector according to the invention, using the kit according to the invention, or the host cell according to the invention, wherein the virus envelope, the fragment of a virus envelope and/or the virus envelope protein package the at least one nucleic acid according to the invention.

[0233] The term “packaged”, as used herein, refers to at least partially engulfed and/or linked. In some embodiments, the packaging nucleic acid of the invention in the virus envelope, the fragment of a virus envelope and/or the virus envelope protein enables entrance into human cells.

[0234] The products of the nucleic acid and/or the vector of the invention show a particularly high antigenic similarity to the corresponding functional virus, if the products are embodied in a virus envelope, a fragment of a virus envelope and/or virus envelope protein. Therefore, the elicited/induced immune reaction will likely induce an immune reaction that is particularly beneficial for the actual contact with the functional virus.

[0235] The nucleotide acid packaged in the virus envelope, the fragment of a virus envelope and/or the virus envelope protein can be transferred into human cell of a subject and induce production of viral proteins in the human cell. This results in prolonged and enhanced exposure of antigenic virus-like proteins with limited replication capabilities.

[0236] Accordingly, the invention is at least in part based on the discovery that the vector described herein enables efficient production of a combination virus-like proteins with limited replication capabilities but similar antigenic effect to the original virus.

[0237] In certain embodiments, the invention relates to a kit comprising I.) the nucleic acid sequence of the invention; and II.) at least one SARS-COV-2 sequence part complementary to the nucleic acid sequence comprised in (I.).

[0238] In certain embodiments, the invention relates to a kit comprising I.) the vector of the invention; and II.) at least one SARS-COV-2 sequence part complementary to the nucleic acid sequence comprised in the vector in (I.).

[0239] In certain embodiments, the invention relates to a kit comprising I.) the host cell of the invention; and II.) at least one SARS-COV-2 sequence part complementary to the nucleic acid sequence comprised in the host cell in (I.).

[0240] The inventors found that the nucleic sequences described herein can be used as part of a trans-complementary production system.

[0241] Accordingly, the invention is at least in part based on the finding that SARS-COV-2 particles can be produced by trans-complementary methods, as described herein.

[0242] In certain embodiments, the invention relates to a virus envelope or a fragment of a virus envelope and/or virus envelope protein, wherein the virus envelope or the fragment of a virus envelope and/or the virus envelope protein a) package the at least one nucleic acid of any one of the invention; and b) are obtainable by gene expression using at least one nucleic acid of any one of the invention.

[0243] In certain embodiments, the invention relates to a virus envelope or a fragment of a virus envelope and/or virus envelope protein, wherein the virus envelope or the fragment of a virus envelope and/or the virus envelope protein a) package the at least one nucleic acid of any one of the invention; and b) are obtainable by gene expression using the vector of any one of the invention.

[0244] In certain embodiments, the invention relates to a virus envelope or a fragment of a virus envelope and/or virus envelope protein, wherein the virus envelope or the fragment of a virus envelope and/or the virus envelope protein a) package the at least one nucleic acid of any one of the invention; and b) are obtainable by gene expression using the host cell of the invention.

[0245] In certain embodiments, the invention relates to a virus envelope or a fragment of a virus envelope and/or virus envelope protein, wherein the virus envelope or the fragment of a virus envelope and/or the virus envelope protein a) package the at least one nucleic acid of any one of the invention; and b) are obtainable by gene expression using the method of the invention.

[0246] In certain embodiments, the invention relates to a virus envelope or a fragment of a virus envelope and/or virus envelope protein, wherein the virus envelope or the fragment of a virus envelope and/or the virus envelope protein a) package the at least one nucleic acid of any one of the invention; and b) are obtainable by gene expression using the kit of the invention.

[0247] The kit described herein, can be prepared by collecting the necessary host cell(s) and reagents. If the nucleic acids comprised in the kit are present in the form of DNA, it is further preferred that they are present in at least one plasmid, preferably in two or more plasmids. This allows the nucleic acid to be easily introduced into a corresponding host cell, as is also described in the context of the concrete examples below.

[0248] In certain embodiments, the invention relates to a pharmaceutical composition comprising a) at least one nucleic acid according to one of the invention; and b) at least one amino acid sequence obtainable by gene expression using at least one nucleic acid of any one of the invention, using the vector of any one of the invention, using the host cell of the invention, using the method of the invention or using the kit of the invention.

[0249] The term “pharmaceutical composition”, as used herein, refers to a preparation which is in such form as to permit the biological activity of an active ingredient contained therein to be effective, and which contains no additional components which are unacceptably toxic to a subject to which the formulation would be administered.

[0250] In certain embodiments, the invention relates to the pharmaceutical composition of the invention, wherein the at least one amino acid sequence is the virus envelope or a fragment of a virus envelope and/or virus envelope protein of the invention.

[0251] In certain embodiments, the invention relates to the pharmaceutical composition according to the invention for use as a medicament.

[0252] In certain embodiments, the invention relates to the vector of the invention for use as a medicament.

[0253] In certain embodiments, the invention relates to the pharmaceutical composition according to the invention for use in treatment and/or prevention.

[0254] The term “treatment” (and grammatical variations thereof such as “treat” or “treating”), as used herein, refers to clinical intervention in an attempt to alter the natural course of the individual being treated, and can be performed either for prophylaxis or during the course of clinical pathology. Desirable effects of treatment include, but are not limited to, preventing occurrence or recurrence of disease, alleviation of symptoms, diminishment of any direct or indirect pathological consequences of the disease, decreasing the rate of disease progression, amelioration or palliation of the disease state, and remission or improved prognosis.

[0255] In certain embodiments, the invention relates to the pharmaceutical composition according to the invention for use in the prevention of a SARS-COV-2 infection or at least one symptom thereof.

[0256] In certain embodiments, the invention relates to the vector of the invention for use in the prevention of a SARS-COV-2 infection or at least one symptom thereof.

[0257] In some embodiments, the symptoms of a SARS-COV-2 infection includes at least one symptom selected from the group of fever, cough, fatigue, difficulty breathing, chills, joint pain, muscle pain, expectoration, sputum production, dyspnea, myalgia, arthralgia, sore throat, headache, nausea, vomiting, diarrhea, sinus pain, stuffy nose, altered and/or reduced sense of smell, altered and/or reduced sense of taste, lack of appetite, loss of weight, stomach pain, conjunctivitis, skin rash, lymphoma, apathy, and somnolence.

[0258] In some embodiments the pharmaceutical composition according to the invention for use in the prevention of a SARS-COV-2 infection or at least one symptom thereof is a vaccine.

[0259] The term “vaccine”, as used herein, refers to any agent or composition, capable of inducing/eliciting an immune response in a host and which permits to treat and/or prevent an infection and/or a disease. Therefore, non-limiting examples of such agents include proteins, polypeptides, protein/polypeptide fragments, immunogens, antigens, peptide epitopes, epitopes, mixtures of proteins, peptides or epitopes as well as nucleic acids, genes and/or portions of genes (encoding a polypeptide or protein of interest or a fragment thereof).

[0260] The term “SARS-COV-2 infection”, as used herein, may also be understood as “COVID-19”.

[0261] The structural proteins of coronaviruses have shown to elicit an immune response (see, e.g., Li, J. Y., et al., 2020, Virus research, 286, 198074; Walls, A. C., et al., 2020, Cell, 181(2), 281-292. e6; Chen, Z, et al., 2004, Clinical chemistry, 50(6), 988-995; Peng, Y., et al., 2020, Nature immunology, 21(11), 1336-1345.). The means and methods provided enable to inducing/eliciting an equivalent immune response by the production and administration of a vaccine with the equivalent epitopes and/or particles with reduced immune evading mechanisms. In some embodiments, the vaccine induces production of particles with limited replicative capabilities in subject to

[0262] Thus, these vaccines thus differ massively from classical vaccines, which are often derived from animal serum and are therefore molecularly inconsistent. The production from animal organisms is traditionally the method of choice. However, the molecularly unclear products lead to massive quality problems and variation from production batch to production batch. This is also associated with the long approval period and the side effects that are often discovered only late. A molecularly defined product composition, as it can be obtained using the nucleic acid according to the invention, is therefore advantageous.

[0263] Furthermore, the vaccine described herein, is both clearly defined and offers a broad range of antigenic epitopes. This results in the advantage that the vaccine has a low or no requirement for adjuvants that enhance the immune response. Such adjuvants that enhance the immune response are typically associated with side effects such as allergic reactions in some patients. Furthermore, the primary active components of the vaccine as described herein are protein-based and are therefore more thermostable compared to other vaccines (e.g., RNA vaccines). The vaccine of the invention is therefore easily transportable and storable due to its stability.

[0264] Accordingly, the invention is a least in part based on the discovery, that the vaccine as described herein is particularly useful in the treatment and/or prevention of a SARS-CoV-2 infection.

[0265] “a,” “an,” and “the” are used herein to refer to one or to more than one (i.e., to at least one, or to one or more) of the grammatical object of the article.

[0266] “or” should be understood to mean either one, both, or any combination thereof of the alternatives.

[0267] “and/or” should be understood to mean either one, or both of the alternatives.

[0268] Throughout this specification, unless the context requires otherwise, the words “comprise”, “comprises” and “comprising” will be understood to imply the inclusion of a stated step or element or group of steps or elements but not the exclusion of any other step or element or group of steps or elements.

[0269] The terms “include” and “comprise” are used synonymously. “preferably” means one option out of a series of options not excluding other options. “e.g.” means one example without restriction to the mentioned example. By “consisting of” is meant including, and limited to, whatever follows the phrase “consisting of.”

[0270] Reference throughout this specification to “one embodiment”, “an embodiment”, “a particular embodiment”, “a related embodiment”, “a certain embodiment”, “an additional embodiment”, “some embodiments”, “a specific embodiment” or “a further embodiment” or combinations thereof means that a particular feature, structure or characteristic described in connection with the embodiment is included in at least one embodiment of the present invention. Thus, the appearances of the foregoing phrases in various places throughout this specification are not necessarily all referring to the same embodiment. Furthermore, the particular features, structures, or characteristics may be combined in any suitable manner in one or more embodiments. It is also understood that the positive recitation of a feature in one embodiment, serves as a basis for excluding the feature in a particular embodiment.

[0271] Unless otherwise defined, all technical and scientific terms used herein have the same meaning as commonly understood by one of ordinary skill in the art to which this invention pertains. Although methods and materials similar or equivalent to those described herein can be used in the practice or testing of the present invention, suitable methods and materials are described below. In case of conflict, the present specification, including definitions, will control. In addition, the materials, methods, and examples are illustrative only and not intended to be limiting.

[0272] The general methods and techniques described herein may be performed according to conventional methods well known in the art and as described in various general and more specific references that are cited and discussed throughout the present specification unless otherwise indicated. See, e.g., Sambrook et al., Molecular Cloning: A Laboratory Manual, 2d ed., Cold Spring Harbor Laboratory Press, Cold Spring Harbor, N.Y. (1989) and Ausubel et al., Current Protocols in Molecular Biology, Greene Publishing Associates (1992), and Harlow and Lane Antibodies: A Laboratory Manual, Cold Spring Harbor Laboratory Press, Cold Spring Harbor, N.Y. (1990).

[0273] While aspects of the invention are illustrated and described in detail in the figures and foregoing description, such illustration and description are to be considered illustrative or exemplary and not restrictive. It will be understood that changes and modifications may be made by those of ordinary skill within the scope and spirit of the following claims. In particular, the present invention covers further embodiments with any combination of features from different embodiments described above and below.

### BRIEF DESCRIPTION OF FIGURES

[0274] FIG. 1: MAP of E-gene plasmid and genes (SEQ ID NO: 27)

[0275] FIG. 2: Map of ORF6 plasmid and genes (SEQ ID NO: 28)

[0276] FIG. 3: Map of ORF7a plasmid and genes (SEQ ID NO: 29)

[0277] FIG. 4: Map of ORF8 plasmid and genes (SEQ ID NO: 30)

[0278] FIGS. 5-8: Demonstration of expression of the respective genes in eukaryotic cells (mRNA expression demonstrated by RT-qPCR)

[0279] FIG. 5: Expression in hygro-selected Vero cells: E expression (RT-PCR to verify RNA-expression): dark line: amplification with reverse transcriptase (RNA plus DNA), light grey: amplification without RT reaction to demonstrate the level of DNA background (from integrated cellular DNA)

[0280] FIG. 6: Expression in hygro-selected Vero cells: orf 6 expression (RT-PCR to verify RNA-expression): dark color: amplification with reverse transcriptase (RNA plus DNA), light grey: amplification without RT reaction to demonstrate the level of DNA background (from integrated cellular DNA)

[0281] FIG. 7: Expression in hygro-selected Vero cells: orf 7a expression (RT-PCR to verify RNA-expression): dark color: amplification with reverse transcriptase (RNA plus DNA), light grey: amplification without RT reaction to demonstrate the level of DNA background (from integrated cellular DNA)

[0282] FIG. 8: Expression in hygro-selected Vero cells: ORF8 expression (RT-PCR to verify RNA-expression): dark color: amplification with reverse transcriptase (RNA plus DNA), light grey: amplification without RT reaction to demonstrate the level of DNA background (from integrated cellular DNA)

[0283] FIG. 9: Demonstration of virus production: Following DNA introduction of the full genome, a virus-typical cytopathic effect is induced

[0284] FIG. 10: The virus, after expansion in cell culture, has been titrated and shown to lead to the same virus titers as the clinical reference isolate of SARS-COV-2: the final dilution with infection events is shown with individual plaques in column 3. Row A=uninfected control, Rows B-D=clinical isolate (reference); Rows E-G=rescued virus)

[0285] FIG. 11: Map of ORF3a plasmid and genes (SEQ ID NO: 32)

[0286] FIG. 12: Map of N-gene plasmid and genes (SEQ ID NO: 31)

[0287] FIG. 13: Genomic organization of the 4 DNA fragments, which lead to the intracellular re-constitution of a full-length SARS-COV-2 genome. Inside the transfected target cell, DNA fragments recombine. The initial RNA transcription step is facilitated by a heterologous promoter linked upstream of fragment A along with non-coding signal sequences downstream from fragment D.

[0288] FIG. 14: NGS analysis of the faithfulness of 26 virus genomes after cellular reconstitution of functional SARS-COV-2 from four co-transfected DNA segments (SEQ ID NO: 22-24, 68). Upper dark grey bars represent the full-length sequences; single nucleotide changes or deletions are indicated as light bars in the respective sequences (SEQ ID NO: 38-63). The orthogonal marks at the top show the precise positions of the different fragment termini. Lower light grey Bars show the positions and extension of the four DNA fragments A-D.

[0289] FIG. 15: A) Cell-free infection of unmodified VeroE6 cells with the same amount of reconstituted virus, either full-length or RVX-13 (comprising SEQ ID NO: 26). B) depicts the viral levels of full-length virus (FL) or the vaccine viruses RVX-13 (comprising SEQ ID NO: 26) and RVX-14 (comprising SEQ ID NO: 65) by quant. RT-PCR in supernatant samples of infected cultures after passage 6 in VeroE6 cells.

[0290] FIG. 16: A) Quantitative RT-PCR plot for supernatant samples after six cell-free passages of the full-length reconstituted SARS-COV-2 (detected lines) and of the vaccine viruses RVX-13 (comprising SEQ ID NO: 26) and RVX-14 (comprising SEQ ID NO: 65) (lines below detection threshold). All values for the RVX-vaccine viruses remain below the amplification threshold with no indication of a positive RNA-signal. B) Quantification of a virus standard with a titrated stock of the clinical Wuhan isolate. Virus amount from left: 3×10e7; 3×10e6; 3×10e5; 3×10e4; 3×10e3.

[0291] FIG. 17: Plasmid map for the M-plasmid (pcDNA3.1hygro(+) _M (SEQ ID NO: 64)).

### EXAMPLES

### Example 1—Reconstitution of the Viral Genome

[0292] The SARS-COV-2 genome described in this application is produced in the form of 1-8 complementing segments, which reconstitute the complete viral genome with all genes of SARS-COV-2 or a viral genome with all genes of SARS-COV-2 except for the ones that were deliberately eliminated, (i.e. E-gene, orf 6, orf 7a, orf 8). For initiation of the production of the viral RNA genome, a separate promoter element, e.g. from Cytomegalovirus, is attached to the 5′ end of the genome; the 3′ end is engineered to contain a poly A tail of suitable length, a ribozyme cleavage element and a eukaryotic poly A signal (e.g. SV40 or bGH). The final 1-8 segments can be re-assembled in two principal ways:
[0293] 1 either prior to introduction into the cell, using published methods such as Gibson assembly or site-specific ligation using a ligase enzyme to connect type II restriction sites, which had been engineered to the termini of each fragment. Of note, for the introduction of restriction sites, the alteration of the protein was avoided or minimized (limited to conservative changes), or
[0294] 2 by engineering the 1-8 fragments in a way that the termini of adjacent fragments possess a sequence overlap (identical sequence in both adjacent fragments) of 30-40nucleotide pairs. With appropriate means these fragments are then introduced in stoichiometric amounts into the target cell, in which the reassembly of the complete SARS-COV-2 genome will occur via recombination, facilitated by cellular enzymes.

[0295] A further alternative is the introduction of extracellularly in vitro produced RNA of the entire SARS-COV-2 genome, or a viral genome with all genes of SARS-COV-2 except for the ones that were deliberately eliminated, (i.e. E-gene, orf 6, orf 7a, orf 8), which can be obtained by linking a T7 promoter to the 5′ end of the viral genome. Commercial T7 polymerase allows the efficient production of genomic SARS-COV-2 RNA, which can be introduced by published means (e.g. electroporation or transfection reagents such as Jet-messenger etc.).

### Example 2—Cellular Introduction

[0296] The cell lines used for this process are preferably HEK293 cells but can be other cells suitable for effective DNA introduction by transfection, such as HeLa, BHK, or Vero-clones.

[0297] For the efficient introduction, special commercially available facilitators are used, preferentially Lipofectamine 3000 or jetPRIME, but also other related products or methods using Ca-Phosphate or electroporation. For this process, manufacturers' protocols or adaptations of the same are used.

[0298] Methods for the coexpression of the necessary complementing genes or of viral genes, which are needed for efficient vaccine production (e.g. expression plasmids or RNA of the viral nucleocapsid gene) are co-transfected with the genomic nucleic acid.

[0299] Since the introduced viral vaccine genomes miss defined genes of SARS-COV-2, those gene products have to be provided either by the host cell (stable transduced or transfected before-hand) or by co-transfection of expression plasmids for the missing genes.

### Example 3—Virus Recovery

[0300] After introduction of the nucleic acid constructs into the target cells, the production of viral RNA templates is initiated spontaneously, either from the introduced RNA genomes or after transcription of the DNA genome. Mechanistically, negative-stranded RNA genomes are produced, which then serve as template for the positive stranded mRNAs and the genomic full-length RNA.

[0301] Since the expression in such a transient introduction situation by transfection declines after 3-4 days, the transfected cultures are co-cultivated with susceptible cells, i.e. those cells, which constitutively express the missing genes. As a result, the transfected cells will transmit the virus progeny directly to the second cell type of cells, expressing the missing genes. In these latter cells, a continuous infection is initiated, leading to the production and release of free virus particles.

[0302] These particles will now be fully infectious only for the cell line expressing the missing genes (producer cell), allowing the propagation of the vaccine virus. In contrast, when these virus particles are used to infect naïve cells (with the complementing functions missing), no viral replication will occur.

### Example 4

[0303] This cell system reflects a biologically safe system for the production of single-cycle virus, which is only infectious as long as the producer cell is used. Due to this restriction, the virus production can be transferred to a lower biosafety level 2. This facilitates the easy use of this system for diagnostic purposes: Instead of requiring the biosafety level 3 for SARS-COV-2, the engineered cells plus deleted virus genomes can be handled in standard diagnostic settings.

[0304] Yet, since the complementation allows virus propagation (restricted to the very cell and very virus type), plaque reduction assays and virus neutralisation tests can be performed using this invention.

### Example 5

### Versatility of the Clonal System

[0305] We foresee a great versatility of the “cassette system”, employing the molecular reconstitution of a deletion-carrying virus genome utilizing up to 8 subgenomic fragment by the technical flexibility to rapidly introduce relevant mutations and alterations into specific target genes, which are found in only 1 of the fragments. As example, the S-gene, present only in fragment 7 (of 8 fragments) or in Fragment 4a (4 fragments), can readily be manipulated in vitro and re-introduced into the genomic assembly without any need for manipulating any of the other gene segments.

[0306] With this step, the process will be able to easily address viral variation (as seen in the currently emerging variants of clinical concern) and, at the same time, retains the perfect sequence of all other genomic regions.

### Example 6

[0307] On day 7 after transfection and culture in a susceptible Vero cell line, cytopathic changes lead to the production of virus plaques in the cell layer.

[0308] Virus titration (FIG. 10) was performed by a serial 2-fold dilution of each virus stock. After plating onto susceptible Vero cells and 48 hrs of incubation, cultures were fixed, stained with crystal violet and microscopically inspected for viral plaque

### Materials and Methods

[0309] Sequence verification of the viral genome and of the presence of genes in the producer cell
[0310] Cell establishment, selection process

[0311] Expression plasmids of the expressible, isolated viral genes utilize either standard expression vectors or constructs, in which inducible promoters
[0312] Verification of expression

[0313] After stable introduction and expansion of cell clones surviving the antibiotic selection step, mRNA expression is demonstrated, and for some genes also protein expression.
[0314] Transfection protocol

[0315] Cells are transfected with a suitable DNA-or RNA transfection method, using lipid-based facilitating reagents, Ca-phosphate or electroporation using standard protocols or adaptations thereof.

[0316] After cell culture and/or cocultivation of transfected transient expressor cells (293T, BHK) with susceptible producer cells (Vero+E+7, etc.), virus production could be demonstrated by the spontaneous occurrence of a coronavirus-typical cytopathic effect, by RT-PCR of filtered supernatant for the titer of viral RNA, and via plaque assay using stepwise dilutions of 1st generation viral supernatant on susceptible producer cells
[0317] Functional complementation protocol: proof of virus production

[0318] Transfection of producer cells with the virus deletion variant is followed by an extended culture period, during which the spontaneous development of cytopathic changes (CPE), i.e. plaque formation is monitored by microscopic inspection. As soon as increasing CPE and cell death is noted, cell-free supernatant samples are transferred onto a layer of uninfected producer cells. The development of CPE after about 2 days and the simultaneous demonstration of SARS-COV-2 specific RNA by RT-PCR serve as proof of viral replication.
[0319] Infection protocol and read-out

[0320] Susceptible cells were incubated with dilutions of vaccine virus using inoculum titers of 0.1 to 0.01. From day 2 after infection, cell viability and plaque-formation were inspected, and virus harvested on days 3-5.
[0321] Virus propagation, stock production

[0322] Virus supernatant from infected cultures was obtained by removal of culture supernatant and clarification by centrifugation. Virus aliquots were stored frozen at −70° C., and virus titers determined in a standard plaque assay using susceptible producer cells. For testing, infected cells were overlayed with low-melting agarose, fixed on day 2 and stained with crystal violet for enumeration of infection events (=plaques)

### Example 7

[0323] 1) The complete SARS-COV-2 genome, flanked by the cytomegalovirus promoter (CMV) at the 5′ and a poly A tail of 30-35nt length, the hepatitis delta ribozyme and simian virus 40 polyadenylation signal (HDV/SV40) at the 3′ termini, was cloned into four plasmids and PCR amplified with Q5 high-fidelity polymerase (M0491S, NEB). For this approach, the complete viral genome including all genes was amplified to generate wild type virus for proof of principle. PCR primers were designed to generate 20-25 nt overlaps between the adjacent fragments to enable subsequent assembly of the full-length genome by the Gibson method (Gibson, et al., 2009, Nature Methods 6 (5): 343-345). The NEBuilder HiFi DNA Assembly cloning kit (E5520S, NEB) was used and the manufacturers protocol was followed. Without purification, this product served as template for another round of PCR to further amplify the full-length product. Following EtOH purification, 2 ug of the full-length viral DNA genome were transfected into 4×10\hat{ }5 293T cells using jetPRIME (114-07, Polyplus). The next day, susceptible Vero E6/TMPRSS2 cells were added at 30% confluency. Supernatant from this co-culture was passaged onto fresh Vero E6/TMPRSS2 cells and first CPE was detected eight days post transfection. Presence of infectious virus was confirmed by passaging the supernatant twice onto fresh Vero E6/TMPRSS2 cells and confirming CPE (FIG. 9), RT-qPCR and NGS sequencing of the supernatant. The latter confirmed the presence of an unique Sall site that was introduced by silent mutation for identification.

[0324] 2) A second strategy follows the ISA (infectious subgenomic amplicons) method described by Aubry et al. 2014 The Journal of General Virology 95 (Pt 11): 2462-2467. Transfection of overlapping double-stranded DNA fragments will lead to a full-length viral DNA copy after intracellular recombination. In this approach, four fragments were amplified from the plasmids described before (frA, frB, frC, frD) with primers designed to generate 100 nt homology regions between the fragments. Amplicons were purified using the QIAquick PCR purification kit (28104, Qiagen) and 2.5 ug of an equimolar mix was transfected into 4×10\hat{ }5 293T cells using Lipofectamine-3000 (L3000001, Invitrogen). After transfection, the same procedure was carried out as described in 1.

[0325] The first as well as the second strategy worked on the in trans complementing cell lines, proofing the capability of these cells to be transfectable as well as infectable. For the production of virus missing the eliminated genes, fragment D will be replaced by fragment D1 (SEQ ID NO: 25) or D2 (SEQ ID NO: 26) and only cell lines expressing the eliminated genes in trans will be used. The same protocols as described in 1) and 2) will be followed as well as the following:

[0326] 3) A small sequence inserted between the CMV promoter and the 5′ UTR encodes for the T7 promoter which enables the in vitro transcription of genomic full-length mRNA. Following the published work by Xie and colleagues with minor changes, the RiboMAX Large Scale RNA production system (P1300, Promega) was used for production of viral mRNA (Xie et al., 2021, Nature Protocols 16 (3): 1761-1784). In short: 20 ug of full-length mRNA together with 10 ug of N mRNA were electroporated into 1×10\hat{ }6 Vero E6/TMPRSS2 cells using the Amaxa 4D nucleofector device (Lonza), following the manufacturers protocol.

[0327] 4) The four fragments covering the whole SARS-COV-2 genome, except the deliberately eliminated genes, were designed to have typellS restriction sites on their 5′ and 3′ ends for liberating the fragments from the plasmid backbone. After digestion with the corresponding enzyme specific error-free ligation of the full-length viral DNA genome can be achieved using T4 DNA ligase (M0202S, NEB). The product will be purified using the QiaEX II Gel Extraction kit (20021, Qiagen) or EtOH precipitation. This 32kb DNA construct will be transfected using a suitable transfection reagent (jetPRIME, Lipofectamine-3000, Lipofectamine-LTX) or electroporated using the Amaxa 4D nucleofector device (Lonza).

### Example 8

[0328] Single-stranded RNA corresponding to the vaccine virus genome was obtained by in vitro transcription using T7 polymerase. The so obtained RNA was transfected into suitable cell lines (HEK293T or Vero cells). In the case of the positive control, the full-length construct, unaltered HEK293 or Vero cells supported the replication of the RNA genome, the generation of subgenomic mRNAs and hence translation into viral proteins. These, together with the positive-strand RNA genome, and components from the cell membrane, formed progeny viruses, in this case wild-type, natural SARS-COV-2 viruses. In the case of the deletion mutants, the gene or genes deleted in the virus genome are transfected into the cell lines in the form of DNA (see FIGS. 1-4), leading to the transient expression of the protein or proteins, and thereby providing the missing factor required for enabling the generation of progeny virus. Alternatively (and preferred), cultivation of those cells under selection pressure leads to the stable integration of the gene or the genes into the cell genome, from where the protein or proteins are continuously expressed (with expression we understand the generation of mRNA from the gene (see FIGS. 1-4) and the subsequent translation into proteins). Such cells, either transiently or stably expressing the proteins made from the genes missing in the vaccine virus genome, enable a continuous production of vaccine viruses, characterized by a full set of structural proteins and a vaccine virus genome having one or several genes deleted. The so obtained vaccine viruses were purified in a so-called downstream processing (DSP) process characterized by clarification (separation of cells from the vaccine viruses), DNA digestion by Benzoase, Ultra Filtration/Dia Filtration (“UF/DF”) and finally sterile filtration (0.22 um filtration).

### Example 9

### Demonstration of Biological Safety of RVX-13, RVX-14

[0329] The inventors took the approach to utilize the precise excision of the coding information for the E-gene alone (RVX-14 comprising SEQ ID NO: 65) or in conjunction with 1-2 additional genes, which are responsible for the cellular immune defense (RVX-13 comprising SEQ ID NO: 26). The missing function will then be supplied (=transcomplemented) via a special “producer cell” and never appear in the genome of the viral vaccine.

[0330] The SARS-COV-2 vaccine candidate RVX-13 (comprising SEQ ID NO: 26) and RVX-14 (comprising SEQ ID NO: 65) and as well as the candidate MoVi-1 (comprising SEQ ID NO: 36) represent unique and completely “cycle-blocked” vaccine viruses, unable to replicate.

[0331] Specifically, RVX-13 was assembled from fragments A, B, C, D and D2 (SEQ ID NO: 22, SEQ ID NO: 23, SEQ ID NO: 24, SEQ ID NO: 26 and SEQ ID NO: 68) according to the methods of the previous examples.

[0332] RVX-14 comprises the sequence as defined by SEQ ID NO: 65 and is assembled from fragments A, B, C (SEQ ID NO: 22, SEQ ID NO: 23, SEQ ID NO: 24) and D14 (D14 is a sequence constructed based on a fragment D2 (SEQ ID NO: 68) amended such that a sequence as defined by SEQ ID NO: 65 is located between the sequence part encoding the SARS-COV-2 N protein and the sequence part encoding ORF3a) according to the methods of the previous examples.

[0333] MoVi-1 comprises the sequence as defined by SEQ ID NO: 36 and is assembled from fragments A, B, C (SEQ ID NO: 22, SEQ ID NO: 23, SEQ ID NO: 24) and Dv1 (Dvi is a sequence constructed based on a fragment D2 (SEQ ID NO: 68) amended such that a sequence as defined by SEQ ID NO: 36 is located between the sequence part encoding the SARS-COV-2 N protein and the sequence part encoding ORF3a) according to the methods of the previous examples.

[0334] The basis for this is that the viral genome is missing the described critical gene(s) that are essential for viral replication in normal cell lines susceptible to SARS-COV-2 infection.

[0335] For producing the respective inactive candidate vaccines, special genetically modified cell lines have been designed, which constitutively produce the missing viral function. As a consequence, the infection of these manipulated SARS-COV-2-susceptible cells with the “cycle-blocked” vaccine viruses leads to a “trans-complementation” of the genetic information missing in the incoming viral genome with the viral proteins already produced in this special cell line.

[0336] As a result, the defective viruses will incorporate the viral protein, which is provided by the producer cell, and are now able to produce functionally genuine particles that, however, continue to contain only defective viral RNA genomes.

[0337] This trans-complementation of SARS-COV-2 by a “cell-based viral gene” is a very safe process and does not lead to DNA-recombination in the producer cell, since the transgene DNA exclusively localizes to the cellular nucleus, while the replication of SARS-COV-2 as a positive-stranded RNA virus is confined to the cytoplasmic compartment.

[0338] In the following, evidence to prove safety and stability of the proposed viral production system is provided that is completely replication-blocked in any unmodified normal cell line, susceptible to wild-type SARS-COV-2 infection.

[0339] Consequently, the inventors provide the experimental proof required to allow lowering the biosafety level for the cycle-blocked vaccine viruses RVX-13 (comprising SEQ ID NO: 26), RVX-14 (comprising SEQ ID NO: 65) and MoVi-1 (comprising SEQ ID NO: 36) to biosafety level BSL-2.

### The Vaccine Virus is Faithfully Reconstituted by an Intracellular DNA Recombination Step

[0340] For virus reconstitution the inventors utilize four DNA segments, which overlap by 100 bp, and allow the functional restoration of a full-length viral genome, which then carries the desired deletions. This initial reconstitution represents a necessary first step of the vaccine production process.

[0341] For validation, multiple independent reconstitution experiments were conducted, in which all four subgenomic DNA fragments, necessary to re-generate the complete viral genome, were simultaneously introduced into the susceptible target cell lines HEK293 or VeroE6. The intracellular recombination and repair into full length viral genome happens by a cell-driven spontaneous process, and was assessed by analyzing the emergence of infectious virus progeny. Emerging virus in the cell-free culture supernatant was analyzed by NGS, demonstrating the reproducible repair in a highly defined manner:

[0342] The inventors demonstrate that each recombination and ligation step between the four fragments sketched in FIG. 13 is occurring in a highly faithful manner, as shown by sequence analysis in the emerging virus product at each of the three junctions in 26 independent reconstitution experiments. This is summarized in FIG. 14.

[0343] An in-depth NGS sequence analysis at 1 and 10% cutoff revealed only very few sequence differences from the reference DNA, a clinical Wuhan isolate of SARS-COV-2, which was the starting point for cloning. I.e., none of the analyzed genomes had more than 9 mostly silent or conservative point mutations to the reference in their 30000 nucleotide genome lengths, and no single change was noted, mapping to the recombination region at the fragment junctions.

[0344] These data confirm that the SARS-COV-2 genome recombination by the ‘IDRA-technique’ (for ‘Intracellular DNA-Recombination and Assembly”) to generate the vaccine virus candidates RVX-13 (comprising SEQ ID NO: 26), RVX-14 (comprising SEQ ID NO: 65) and MoVi-1 (comprising SEQ ID NO: 36) is highly precise.

### Genetic Stability of the Vaccine Virus During Replication

[0345] The deletion-carrying vaccine virus is to be added to a production cell line containing the missing structural gene(s) as transgenes. Only by means of this unique property of the producer cell, the vaccine viruses can be replicated. To demonstrate (i) a precise reconstitution, (ii) the absence of aberrant gene recombination and (iii) stability during virus production, the viral genomes from such newly formed virions of the vaccine viruses were analyzed by NGS.

[0346] To exclude one-off events, infections of the production cells and subsequent NGS analysis were conducted several times, independently of each other. In summary: After infection and about 5-10 virus generations, no selection of any consistent mutational patterns or deletions in relevant genes was observed.

[0347] In the 26 analyzed virus reconstitutions, maximally 9 SNPs with mostly silent mutations were observed, indicated by light marks in the top panel of FIG. 14.

[0348] The detailed analysis of all re-joined fragment junctions was conducted with the NGS information for all reconstituted and replication-competent virus isolates. It revealed a high fidelity and the absence of mutations for all of the three junctions, as shown in the example for fragments B and C in FIG. 16.

[0349] The very high sequence-identity between all isolated virus sequences is compiled in FIG. 14. This demonstrates the high fidelity of the intracellular DNA repair mechanism, which leads to the re-composition of fully functional SARS-COV-2 genomes.

[0350] These data prove that the vaccine virus faithfully replicates in a highly reproducible manner without genetic alterations, virus sequence adaptations, or recombination with cellular genes.

Proof that the Vaccine Viruses Cannot Replicate in Unmodified VeroE6 Cells

[0351] It is of utmost importance to verify that the vaccine viruses RVX-13 (comprising SEQ ID NO: 26), RVX-14 (comprising SEQ ID NO: 65) and MoVi-1 (comprising SEQ ID NO: 36) cannot replicate in cell lines, which are typically fully susceptible to SARS-COV-2 replication, such as VeroE6 or 293 HEK cells, expressing the human ACE-2 and TMPRSS2 proteins for viral entry.

[0352] Experimental details of the culture infections leading to the data shown in FIG. 15: After viral reconstitution from DNA on day 0, emerging virus particles were harvested from the culture supernatant (after detection of N-protein in culture supernatant around day 3) and filtered. Virus inoculation in 10 separate parallel infection experiments was done on day 3 at a multiplicity of infection (moi) of ca. 10⁻³, to allow maximal virus spread and propagation). For infection, virus was adsorbed for 4 hrs. After the adsorption period, and to ensure a maximal stringency, the culture medium containing full-length virus (blue line) was completely removed and cells washed 3 times with PBS (**). As the replication competence of the vaccine virus was expected to be lower, the inoculum of RVX-13 (comprising SEQ ID NO: 26) was left on the cultures. Medium was changed only one day later with no washing (***). Infected cultures were continued for 2-3 days to allow maximal virus propagation. Then, supernatant was sampled and analyzed for virus.

[0353] The harvested FL virus was diluted again to a multiplicity of one infectious unit per 1000 cells (a moi of 10⁻³) to initiate a new infection. This procedure will enable us to follow any genetic evolution and adaptation occurring during multiple infection rounds. In order to compensate for an assumed lower infectivity of the vaccine virus, the RVX-13 vaccine virus (comprising SEQ ID NO: 26), a larger volume of 1/10 of the harvested culture supernatant was added as “putative inoculum” to fresh uninfected VeroE6 cells at each blind passage.

[0354] The continuous logarithmic amplification of the reconstituted full-length virus (FL) confirms a full susceptibility of the cell line to infection, and a similar replication pattern of full-length virus is seen after infection of VeroE2T cells, which provide the missing gene.

[0355] In sharp contrast, a complete absence of virus propagation was observed already after the first virus passage for the vaccine viruses RVX-13 (comprising SEQ ID NO: 26) and RVX-14 (comprising SEQ ID NO: 65).

[0356] To exclude one-off events, the addition of the vaccine virus to unmodified cells was repeated, and analyzed by quantitative RT-PCR several times, independently of each other (FIG. 16). The complete absence of signal demonstrates for several independent experiments that the vaccine virus does not produce progeny virus and that it cannot spontaneously revert in unmodified cells in such a way that an infectious, replication-capable wild-type or wild-type-like SARS-COV-2 would emerge.

[0357] Sequential virus passaging has been carried on to 6 such passages of either full-length virus or the two vaccine virus candidates RVX-13 (comprising SEQ ID NO: 26) and RVX-14 (comprising SEQ ID NO: 65).

[0358] While full-length virus continues to yield very high titers within 2-3 days (quantified by RT-PCR: Ct value of ca. 12, FIG. 16), none of the passaged vaccine virus candidates RVX-13 (comprising SEQ ID NO: 26) or RVX-14 (comprising SEQ ID NO: 65) show any sign of virus propagation, even when amplified to 40 PCR cycles (no Ct value). Already at first passage no infectious vaccine virus was detectable in the culture media.

[0359] The quantitative RT-PCR protocol used for our experiments is targeting a viral gene that is not affected by any of the mutations introduced to generate RVX-13 (comprising SEQ ID NO: 26) or-14 (comprising SEQ ID NO: 65). This quantitative in-house protocol has been validated against an official diagnostic protocol (Corman et al, Euro Surveill.2020: 25 (3); doi: 10.2807/1560-7917. ES.2020.25.3.2000045).

[0360] The complete absence of viral replication of RVX-13 (comprising SEQ ID NO: 26) and RVX-14 (comprising SEQ ID NO: 65) over multiple passages in standard cell lines used for SARS-COV-2 propagation (VeroE6, HEK293-TA) proves the biological safety of the vaccine virus;

[0361] This justifies to apply a lower biosafety level for work with these single-cycle vaccine viruses;

[0362] The simultaneous ability to grow virus from the same stocks in specialized producer cells; which provide the missing viral gene(s) renders the vaccine viruses producible for further use.

### Absence of Reversion or Virus Evolution in Vitro; Lack of Recombination Between Viral Genomic RNA and Transgene

[0363] The extensive molecular data package shown in FIGS. 14- 16 strongly supports the statement that the disabled vaccine viruses RVX-13 (comprising SEQ ID NO: 26) and RVX-14 (comprising SEQ ID NO: 65) cannot undergo molecular changes, which would facilitate the restoration of replicative virus.

[0364] Furthermore, one remote theoretical concern could be that the viral RNA genome might find a way to recombine with the complementing transgene, which is present in the nucleus of the producer cell. This repair step should then lead to the re-generation of a virus genome, which is similar to the full-length control used in our experiments.

[0365] However, such an event with emerging full-length virus (with its superior replication capacity) has never been observed, and also our extensive sequence analyses of infections by NGS did not reveal any hint for such recombination event between the cytoplasmic viral genomes and cellular DNA information.

[0366] In the experimental setup delineated above, the complete absence of any viral recovery in vitro after multiple sequential virus passages serves as solid evidence that no viral reversion to “wild-type” was and will be possible during in vitro passage.

[0367] This finding fully supports the intention of the molecular design strategy for the vaccine viruses RVX-13 (comprising SEQ ID NO: 26) and RVX-14 (comprising SEQ ID NO: 65) or MoVi-1 (comprising SEQ ID NO: 36): The complete open reading frame of the viral genes of interest was deleted, leading to a situation that does not allow any recombination of “residual sequences” with any counterpart in the producer cell, thus eliminating viral genome repair.

### Summary

[0368] 1. The inventors have demonstrated that, after multiple cell passages of vaccine viruses RVX-13 (comprising SEQ ID NO: 26) and RVX-14 (comprising SEQ ID NO: 65) in a genetically engineered producer cell, more than 99% of its original, authentic sequence is fully retained after the 6th generation of the vaccine viruses (further passaging is continued).
[0369] 2. The inventors show that in ten parallel infections of the vaccine viruses RVX-13 (comprising SEQ ID NO: 26) and RVX-14 (comprising SEQ ID NO: 65) and after multiple blind-passages on VeroE6 cells, no viable virus emerges; already after the first passage no replicative virus can be demonstrated in normal, SARS-COV-2susceptible cells.
[0370] 3. A highly sensitive analysis of RVX-13 (comprising SEQ ID NO: 26) and RVX-14 (comprising SEQ ID NO: 65) by next-generation sequencing (NGS) reveals that after sequential passages in permissive producer cells, the population of offspring vaccine virus is found to be well conserved, containing less than 0.1% codon-changing point mutations.
[0371] 4. This demonstrates that the vaccine virus cannot and does not spontaneously change during virus propagation in cell culture in the producer cells and remains unable to re-generate infectious, replication-competent wild-type or wild-type-like SARS-COV-

1. A biologically produced nucleic acid sequence comprising
a) two or three primary nucleic acid sequence parts, wherein a primary nucleic acid sequence part encodes an amino acid sequence selected from the group consisting of
i) SEQ ID NO: 1 (SARS-COV-2 N) or an amino acid sequence with at least 90% sequence identity thereof;
ii) SEQ ID NO: 2 (SARS-COV-2 S) or an amino acid sequence with at least 90% sequence identity thereof;
iii) SEQ ID NO: 3 (SARS-COV-2 E) or an amino acid sequence with at least 90% sequence identity thereof; and
iv) SEQ ID NO: 4 (SARS-COV-2 M) or an amino acid sequence with at least 90% sequence identity thereof; and
b) not more than three, not more than two not more than one or no secondary nucleic acid sequence part(s), wherein a secondary nucleic acid sequence part encodes an amino acid sequence having the function of a SARS-COV-2 amino acid sequence encoded by ORF3a, ORF6, ORF7a, or ORF8, wherein if no sequence part of a) iii) and no nucleic acid sequence part that encodes an amino acid sequence having the function of a SARS-CoV-2 amino acid sequence encoded by ORF3a are present, then not more than five, not more than four, not more than three nucleic acid sequence parts selected from a)i), a)ii), a)iv), and nucleic acid sequence parts encoding an amino acid sequence having the function of a SARS-COV-2 amino acid sequence encoded by ORF6, ORF7a, or ORF8 are present.

2. The nucleic acid sequence of claim 1, wherein the nucleic acid sequence comprises two or three primary nucleic acid sequence parts, wherein a primary nucleic acid sequence part encodes an amino acid sequence selected from the group consisting of
i) SEQ ID NO: 1 (SARS-COV-2 N) or an amino acid sequence with at least 90% sequence identity thereof;
ii) SEQ ID NO: 2 (SARS-COV-2 S) or an amino acid sequence with at least 90% sequence identity thereof; and
iii) SEQ ID NO: 3 (SARS-COV-2 E) or an amino acid sequence with at least 90% sequence identity thereof; and
wherein the nucleic acid sequence has no sequence part that encodes an amino acid sequence having the function of a SARS-COV-2 amino acid sequence encoded by SEQ ID NO: 4(SARS-COV-2 M).

3. The nucleic acid sequence of claim 2, wherein the nucleic acid sequence comprises three primary nucleic acid sequence parts:
i) SEQ ID NO: 1 (SARS-COV-2 N) or an amino acid sequence with at least 90% sequence identity thereof;
ii) SEQ ID NO: 2 (SARS-COV-2 S) or an amino acid sequence with at least 90% sequence identity thereof; and
iii) SEQ ID NO: 3 (SARS-COV-2 E) or an amino acid sequence with at least 90% sequence identity thereof.

4. The nucleic acid sequence of claim 2, wherein
1.) the nucleic acid sequence comprises no nucleic acid sequence part encodes an amino acid sequence having the function of a SARS-COV-2 amino acid sequence encoded by ORF7 and ORF8; )
2.) the nucleic acid sequence comprises no nucleic acid sequence part encodes an amino acid sequence having the function of a SARS-COV-2 amino acid sequence encoded by ORF6 and ORF7ab; or)
3.) the nucleic acid sequence comprises no nucleic acid sequence part encodes an amino acid sequence having the function of a SARS-COV-2 amino acid sequence encoded by ORF6, ORF7ab and ORF8.

5. The nucleic acid sequence of claim 4, wherein the nucleic acid sequence comprises a primary nucleic acid sequence part encoding an amino acid sequence a) i), a secondary nucleic acid sequence part encoding an amino acid sequence having the function of a SARS-COV-2 amino acid sequence encoded by ORF3a and a sequence part of the nucleic acid sequence located between the primary nucleic acid sequence part encoding an amino acid sequence a) i) and the secondary nucleic acid sequence part encoding an amino acid sequence having the function of a SARS-COV-2 amino acid sequence encoded by ORF3a, wherein the sequence part comprises
I) SEQ ID NO: 35 or a sequence having at least 90% sequence identity to SEQ ID NO: 35;
II) SEQ ID NO: 36 or a sequence having at least 90% sequence identity to SEQ ID NO: 36; or
III) SEQ ID NO:37 or a sequence having at least 90% sequence identity to SEQ ID NO: 37.

6. A biologically produced nucleic acid sequence comprising two or three nucleic acid sequence parts encoding an amino acid sequence selected from the group consisting of:
i) SEQ ID NO: 1 (SARS-COV-2 N) or an amino acid sequence with at least 90% sequence identity thereof;
ii) SEQ ID NO: 2 (SARS-COV-2 S) or an amino acid sequence with at least 90% sequence identity thereof; and
iii) SEQ ID NO: 3 (SARS-COV-2 E) or an amino acid sequence with at least 90% sequence identity thereof; and
wherein the nucleic acid sequence has no sequence part that encodes an amino acid sequence having the function of a SARS-COV-2 amino acid sequence encoded by SEQ ID NO: 4 (SARS-COV-2 M), preferably wherein the nucleic acid sequence comprises a sequence as defined by SEQ ID NO: 33.

7. The nucleic acid sequence of claim 3, wherein the nucleic acid sequence comprises two primary nucleic acid sequence parts:
i) SEQ ID NO: 1 (SARS-COV-2 N) or an amino acid sequence with at least 90% sequence identity thereof; and
ii) SEQ ID NO: 2 (SARS-COV-2 S) or an amino acid sequence with at least 90% sequence identity thereof; and
wherein the nucleic acid sequence has no sequence part that encodes an amino acid sequence having the function of a SARS-COV-2 amino acid sequence encoded by SEQ ID NO: 4 (SARS-COV-2 M) and SEQ ID NO: 3 (SARS-COV-2 E), preferably wherein the nucleic acid sequence comprises a sequence as defined by SEQ ID NO: 34.

8. The nucleic acid sequence of claim 1, wherein for the secondary nucleic acid sequence part encoding an amino acid sequence having the function of a SARS-COV-2 amino acid sequence
i) ORF3a is a sequence defined by SEQ ID NO: 5;
ii) ORF6 is a sequence defined by SEQ ID NO: 6;
iii) ORF7a is a sequence defined by SEQ ID NO: 7; and/or
iv) ORF8 is a sequence defined by SEQ ID NO: 9.

9. The nucleic acid sequence of claim 1, wherein the nucleic acid sequence comprises three primary nucleic acid sequence parts.

10. The nucleic acid sequence of claim 1, wherein one of the secondary nucleic acid sequence parts encodes an amino acid sequence having the function of a SARS-COV-2 amino acid sequence encoded by ORF3a.

11. The nucleic acid sequence of claim 1, wherein the primary nucleic acid sequence parts and the secondary nucleic acid sequence parts are ordered in 5′ to 3′ direction in the following order:
1. SEQ ID NO: 2 (SARS-COV-2 S) or an amino acid sequence with at least 90% sequence identity thereof,
2. nucleic acid sequence part encoding an amino acid sequence having the function of a SARS-COV-2 amino acid sequence encoded by ORF3a;
3. SEQ ID NO: 3 (SARS-COV-2 E) or an amino acid sequence with at least 90% sequence identity thereof,
4. SEQ ID NO: 4 (SARS-COV-2 M) or an amino acid sequence with at least 90% sequence identity thereof,
5. nucleic acid sequence part encoding an amino acid sequence having the function of a SARS-COV-2 amino acid sequence encoded by ORF6,
6. nucleic acid sequence part encoding an amino acid sequence having the function of a SARS-COV-2 amino acid sequence encoded by ORF7a,
7. nucleic acid sequence part encoding an amino acid sequence encoding an amino acid sequence having the function of a SARS-COV-2 amino acid sequence encoded by ORF8,
8. SEQ ID NO: 1 (SARS-COV-2 N) or an amino acid sequence with at least 90% sequence identity thereof.

12. The nucleic acid sequence of claim 1, wherein the nucleic acid sequence comprises a nucleic acid sequence defined by the SEQ ID NO: 10 (SARS-COV-2 genome) or a sequence with at least 90% sequence identity thereof with a deletion and/or a dysfunctionality of:
a) the E gene, ORF6 gene, ORF7a gene and ORF8 gene; or
b) the E gene, ORF6 gene and ORF8 gene.

13. A vector comprising the nucleic acid sequence of claim 1.

14. (canceled)

15. The vector of claim 13, wherein the vector comprises
a) a sequence as defined by SEQ ID NO: 11 (biologically produced vector with ORF7a gene) or a sequence having 90% sequence identity thereof; or
b) a sequence as defined by SEQ ID NO: 12 (biologically produced vector without ORF7a gene) or a sequence having 90% sequence identity thereof.

16. A host cell comprising the nucleic acid sequence of claim 1.

17. The host cell of claim 16 additionally comprising at least one complementary SARS-COV-2 sequence thereof.

18. A method of production of a virus envelope and/or a fragment of a virus envelope and/or virus envelope protein comprising culturing the host cell of claim 16.

19. A kit comprising
I.) the nucleic acid sequence of claim 1; and
II.) at least one SARS-COV-2 sequence part complementary to the nucleic acid sequence comprised in (I.).

20. A virus envelope or a fragment of a virus envelope and/or virus envelope protein, wherein the virus envelope or the fragment of a virus envelope and/or the virus envelope protein
a) packages package-the at least one nucleic acid of claim 1; and
b) is are obtainable by gene expression using at least one nucleic acid of claim 1,

21. A pharmaceutical composition comprising
a) at least one nucleic acid according to claim 1, and
b) at least one amino acid sequence obtainable by gene expression using at least one nucleic acid of claim 1.

22. The pharmaceutical composition of claim 21, wherein the at least one amino acid sequence is the virus envelope or a fragment of a virus envelope and/or virus envelope protein of claim 20.

23. (canceled)

24. (canceled)

25. A method of preventing a SARS-COV-2 infection or at least one symptom thereof comprising administering an effective amount of the pharmaceutical composition according to claim 21 to a subject.

The application's sequence listing, which the Patent Office published only in electronic form, follows.

SEQUENCE LISTING (68 sequences)

SEQ ID NO: 1 - protein, 419 aa, synthetic construct
  REGION 1..419: note = N Protein
MSDNGPQNQRNAPRITFGGPSDSTGSNQNGERSGARSKQRRPQGLPNNTASWFTALTQHGKEDLKFPRGQGVPINTNSSPDDQIGYYRRATRRIRGGDGKMKDLSPRWYFYYLGTGPEAGLPYGANKDGIIWVATEGALNTPKDHIGTRNPANNAAIVLQLPQGTTLPKGFYAEGSRGGSQASSRSSSRSRNSSRNSTPGSSRGTSPARMAGNGGDAALALLLLDRLNQLESKMSGKGQQQQGQTVTKKSAAEASKKPRQKRTATKAYNVTQAFGRRGPEQTQGNFGDQELIRQGTDYKHWPQIAQFAPSASAFFGMSRIGMEVTPSGTWLTYTGAIKLDDKDPNFKDQVILLNKHIDAYKTFPPTEPKKDKKKKADETQALPQRQKKQQTVTLLPAADLDDFSKQLQQSMSSADSTQA

SEQ ID NO: 2 - protein, 1273 aa, synthetic construct
  REGION 1..1273: note = S Protein
MFVFLVLLPLVSSQCVNLTTRTQLPPAYTNSFTRGVYYPDKVFRSSVLHSTQDLFLPFFSNVTWFHAIHVSGTNGTKRFDNPVLPFNDGVYFASTEKSNIIRGWIFGTTLDSKTQSLLIVNNATNVVIKVCEFQFCNDPFLGVYYHKNNKSWMESEFRVYSSANNCTFEYVSQPFLMDLEGKQGNFKNLREFVFKNIDGYFKIYSKHTPINLVRDLPQGFSALEPLVDLPIGINITRFQTLLALHRSYLTPGDSSSGWTAGAAAYYVGYLQPRTFLLKYNENGTITDAVDCALDPLSETKCTLKSFTVEKGIYQTSNFRVQPTESIVRFPNITNLCPFGEVFNATRFASVYAWNRKRISNCVADYSVLYNSASFSTFKCYGVSPTKLNDLCFTNVYADSFVIRGDEVRQIAPGQTGKIADYNYKLPDDFTGCVIAWNSNNLDSKVGGNYNYLYRLFRKSNLKPFERDISTEIYQAGSTPCNGVEGFNCYFPLQSYGFQPTNGVGYQPYRVVVLSFELLHAPATVCGPKKSTNLVKNKCVNFNFNGLTGTGVLTESNKKFLPFQQFGRDIADTTDAVRDPQTLEILDITPCSFGGVSVITPGTNTSNQVAVLYQDVNCTEVPVAIHADQLTPTWRVYSTGSNVFQTRAGCLIGAEHVNNSYECDIPIGAGICASYQTQTNSPRRARSVASQSIIAYTMSLGAENSVAYSNNSIAIPTNFTISVTTEILPVSMTKTSVDCTMYICGDSTECSNLLLQYGSFCTQLNRALTGIAVEQDKNTQEVFAQVKQIYKTPPIKDFGGFNFSQILPDPSKPSKRSFIEDLLFNKVTLADAGFIKQYGDCLGDIAARDLICAQKFNGLTVLPPLLTDEMIAQYTSALLAGTITSGWTFGAGAALQIPFAMQMAYRFNGIGVTQNVLYENQKLIANQFNSAIGKIQDSLSSTASALGKLQDVVNQNAQALNTLVKQLSSNFGAISSVLNDILSRLDKVEAEVQIDRLITGRLQSLQTYVTQQLIRAAEIRASANLAATKMSECVLGQSKRVDFCGKGYHLMSFPQSAPHGVVFLHVTYVPAQEKNFTTAPAICHDGKAHFPREGVFVSNGTHWFVTQRNFYEPQIITTDNTFVSGNCDVVIGIVNNTVYDPLQPELDSFKEELDKYFKNHTSPDVDLGDISGINASVVNIQKEIDRLNEVAKNLNESLIDLQELGKYEQYIKWPWYIWLGFIAGLIAIVMVTIMLCCMTSCCSCLKGCCSCGSCCKFDEDDSEPVLKGVKLHYT

SEQ ID NO: 3 - protein, 75 aa, synthetic construct
  REGION 1..75: note = E Protein
MYSFVSEETGTLIVNSVLLFLAFVVFLLVTLAILTALRLCAYCCNIVNVSLVKPSFYVYSRVKNLNSSRVPDLLV

SEQ ID NO: 4 - protein, 222 aa, synthetic construct
  REGION 1..222: note = M Protein
MADSNGTITVEELKKLLEQWNLVIGFLFLTWICLLQFAYANRNRFLYIIKLIFLWLLWPVTLACFVLAAVYRINWITGGIAIAMACLVGLMWLSYFIASFRLFARTRSMWSFNPETNILLNVPLHGTILTRPLLESELVIGAVILRGHLRIAGHHLGRCDIKDLPKEITVATSRTLSYYKLGASQRVAGDSGFAAYSRYRIGNYKLNTDHSSSSDNIALLVQ

SEQ ID NO: 5 - protein, 275 aa, synthetic construct
  REGION 1..275: note = ORF3a
  source 1..275: note = virus
MDLFMRIFTIGTVTLKQGEIKDATPSDFVRATATIPIQASLPFGWLIVGVALLAVFQSASKIITLKKRWQLALSKGVHFVCNLLLLFVTVYSHLLLVAAGLEAPFLYLYALVYFLQSINFVRIIMRLWLCWKCRSKNPLLYDANYFLCWHTNCYDYCIPYNSVTSSIVITSGDGTTSPISEHDYQIGGYTEKWESGVKDCVVLHSYFTSDYYQLYSTQLSTDTGVEHVTFFIYNKIVDEPEEHVQIHTIDGSSGVVNPVMEPIYDEPTTTTSVPL

SEQ ID NO: 6 - protein, 61 aa, synthetic construct
  REGION 1..61: note = ORF6
  source 1..61: note = virus
MFHLVDFQVTIAEILLIIMRTFKVSIWNLDYIINLIIKNLSKSLTENKYSQLDEEQPMEID

SEQ ID NO: 7 - protein, 121 aa, synthetic construct
  REGION 1..121: note = ORF7a
  source 1..121: note = virus
MKIILFLALITLATCELYHYQECVRGTTVLLKEPCSSGTYEGNSPFHPLADNKFALTCFSTQFAFACPDGVKHVYQLRARSVSPKLFIRQEEVQELYSPIFLIVAAIVFITLCFTLKRKTE

SEQ ID NO: 8 - protein, 43 aa, synthetic construct
  REGION 1..43: note = ORF7b
  source 1..43: note = virus
MIELSLIDFYLCFLAFLLFLVLIMLIIFWFSLELQDHNETCHA

SEQ ID NO: 9 - protein, 121 aa, synthetic construct
  REGION 1..121: note = ORF8
  source 1..121: note = virus
MKFLVFLGIITTVAAFHQECSLQSCTQHQPYVVDDPCPIHFYSKWYIRVGARKSAPLIELCVDEAGSKSPIQYIDIGNYTVSCLPFTINCQEPKLGSLVVRCSFYEDFLEYHDVRVVLDFI

SEQ ID NO: 10 - DNA, 29867 bp, Severe acute respiratory syndrome-related coronavirus
  misc_feature 1..29867: note = SARS-CoV-2 genome
  source 1..29867: mol_type = other DNA; note = virus
attaaaggtttataccttcccaggtaacaaaccaaccaactttcgatctcttgtagatctgttctctaaacgaactttaaaatctgtgtggctgtcactcggctgcatgcttagtgcactcacgcagtataattaataactaattactgtcgttgacaggacacgagtaactcgtctatcttctgcaggctgcttacggtttcgtccgtgttgcagccgatcatcagcacatctaggtttcgtccgggtgtgaccgaaaggtaagatggagagccttgtccctggtttcaacgagaaaacacacgtccaactcagtttgcctgttttacaggttcgcgacgtgctcgtacgtggctttggagactccgtggaggaggtcttatcagaggcacgtcaacatcttaaagatggcacttgtggcttagtagaagttgaaaaaggcgttttgcctcaacttgaacagccctatgtgttcatcaaacgttcggatgctcgaactgcacctcatggtcatgttatggttgagctggtagcagaactcgaaggcattcagtacggtcgtagtggtgagacacttggtgtccttgtccctcatgtgggcgaaataccagtggcttaccgcaaggttcttcttcgtaagaacggtaataaaggagctggtggccatagttacggcgccgatctaaagtcatttgacttaggcgacgagcttggcactgatccttatgaagattttcaagaaaactggaacactaaacatagcagtggtgttacccgtgaactcatgcgtgagcttaacggaggggcatacactcgctatgtcgataacaacttctgtggccctgatggctaccctcttgagtgcattaaagaccttctagcacgtgctggtaaagcttcatgcactttgtccgaacaactggactttattgacactaagaggggtgtatactgctgccgtgaacatgagcatgaaattgcttggtacacggaacgttctgaaaagagctatgaattgcagacaccttttgaaattaaattggcaaagaaatttgacaccttcaatggggaatgtccaaattttgtatttcccttaaattccataatcaagactattcaaccaagggttgaaaagaaaaagcttgatggctttatgggtagaattcgatctgtctatccagttgcgtcaccaaatgaatgcaaccaaatgtgcctttcaactctcatgaagtgtgatcattgtggtgaaacttcatggcagacgggcgattttgttaaagccacttgcgaattttgtggcactgagaatttgactaaagaaggtgccactacttgtggttacttaccccaaaatgctgttgttaaaatttattgtccagcatgtcacaattcagaagtaggacctgagcatagtcttgccgaataccataatgaatctggcttgaaaaccattcttcgtaagggtggtcgcactattgcctttggaggctgtgtgttctcttatgttggttgccataacaagtgtgcctattgggttccacgtgctagcgctaacataggttgtaaccatacaggtgttgttggagaaggttccgaaggtcttaatgacaaccttcttgaaatactccaaaaagagaaagtcaacatcaatattgttggtgactttaaacttaatgaagagatcgccattattttggcatctttttctgcttccacaagtgcttttgtggaaactgtgaaaggtttggattataaagcattcaaacaaattgttgaatcctgtggtaattttaaagttacaaaaggaaaagctaaaaaaggtgcctggaatattggtgaacagaaatcaatactgagtcctctttatgcatttgcatcagaggctgctcgtgttgtacgatcaattttctcccgcactcttgaaactgctcaaaattctgtgcgtgttttacagaaggccgctataacaatactagatggaatttcacagtattcactgagactcattgatgctatgatgttcacatctgatttggctactaacaatctagttgtaatggcctacattacaggtggtgttgttcagttgacttcgcagtggctaactaacatctttggcactgtttatgaaaaactcaaacccgtccttgattggcttgaagagaagtttaaggaaggtgtagagtttcttagagacggttgggaaattgttaaatttatctcaacctgtgcttgtgaaattgtcggtggacaaattgtcacctgtgctaaggaaattaaggagagtgttcagacattctttaagcttgtaaataaatttttggctttgtgtgctgactctatcattattggtggagctaaacttaaagccttgaatttaggtgaaacatttgtcacgcactcaaagggattgtacagaaagtgtgttaaatccagagaagaaactggcctactcatgcctctaaaagccccaaaagaaattatcttcttagagggagaaacacttcccacagaagtgttaacagaggaagttgtcttgaaaactggtgatttacaaccattagaacaacctactagtgaagctgttgaagctccattggttggtacaccagtttgtattaacgggcttatgttgctcgaaatcaaagacacagaaaagtactgtgcccttgcacctaatatgatggtaacaaacaataccttcacactcaaaggcggtgcaccaacaaaggttacttttggtgatgacactgtgatagaagtgcaaggttacaagagtgtgaatatcacttttgaacttgatgaaaggattgataaagtacttaatgagaagtgctctgcctatacagttgaactcggtacagaagtaaatgagttcgcctgtgttgtggcagatgctgtcataaaaactttgcaaccagtatctgaattacttacaccactgggcattgatttagatgagtggagtatggctacatactacttatttgatgagtctggtgagtttaaattggcttcacatatgtattgttctttctaccctccagatgaggatgaagaagaaggtgattgtgaagaagaagagtttgagccatcaactcaatatgagtatggtactgaagatgattaccaaggtaaacctttggaatttggtgccacttctgctgctcttcaacctgaagaagagcaagaagaagattggttagatgatgatagtcaacaaactgttggtcaacaagacggcagtgaggacaatcagacaactactattcaaacaattgttgaggttcaacctcaattagagatggaacttacaccagttgttcagactattgaagtgaatagttttagtggttatttaaaacttactgacaatgtatacattaaaaatgcagacattgtggaagaagctaaaaaggtaaaaccaacagtggttgttaatgcagccaatgtttaccttaaacatggaggaggtgttgcaggagccttaaataaggctactaacaatgccatgcaagttgaatctgatgattacatagctactaatggaccacttaaagtgggtggtagttgtgttttaagcggacacaatcttgctaaacactgtcttcatgttgtcggcccaaatgttaacaaaggtgaagacattcaacttcttaagagtgcttatgaaaattttaatcagcacgaagttctacttgcaccattattatcagctggtatttttggtgctgaccctatacattctttaagagtttgtgtagatactgttcgcacaaatgtctacttagctgtctttgataaaaatctctatgacaaacttgtttcaagctttttggaaatgaagagtgaaaagcaagttgaacaaaagatcgctgagattcctaaagaggaagttaagccatttataactgaaagtaaaccttcagttgaacagagaaaacaagatgataagaaaatcaaagcttgtgttgaagaagttacaacaactctggaagaaactaagttcctcacagaaaacttgttactttatattgacattaatggcaatcttcatccagattctgccactcttgttagtgacattgacatcactttcttaaagaaagatgctccatatatagtgggtgatgttgttcaagagggtgttttaactgctgtggttatacctactaaaaaggctggtggcactactgaaatgctagcgaaagctttgagaaaagtgccaacagacaattatataaccacttacccgggtcagggtttaaatggttacactgtagaggaggcaaagacagtgcttaaaaagtgtaaaagtgccttttacattctaccatctattatctctaatgagaagcaagaaattcttggaactgtttcttggaatttgcgagaaatgcttgcacatgcagaagaaacacgcaaattaatgcctgtctgtgtggaaactaaagccatagtttcaactatacagcgtaaatataagggtattaaaatacaagagggtgtggttgattatggtgctagattttacttttacaccagtaaaacaactgtagcgtcacttatcaacacacttaacgatctaaatgaaactcttgttacaatgccacttggctatgtaacacatggcttaaatttggaagaagctgctcggtatatgagatctctcaaagtgccagctacagtttctgtttcttcacctgatgctgttacagcgtataatggttatcttacttcttcttctaaaacacctgaagaacattttattgaaaccatctcacttgctggttcctataaagattggtcctattctggacaatctacacaactaggtatagaatttcttaagagaggtgataaaagtgtatattacactagtaatcctaccacattccacctagatggtgaagttatcacctttgacaatcttaagacacttctttctttgagagaagtgaggactattaaggtgtttacaacagtagacaacattaacctccacacgcaagttgtggacatgtcaatgacatatggacaacagtttggtccaacttatttggatggagctgatgttactaaaataaaacctcataattcacatgaaggtaaaacattttatgttttacctaatgatgacactctacgtgttgaggcttttgagtactaccacacaactgatcctagttttctgggtaggtacatgtcagcattaaatcacactaaaaagtggaaatacccacaagttaatggtttaacttctattaaatgggcagataacaactgttatcttgccactgcattgttaacactccaacaaatagagttgaagtttaatccacctgctctacaagatgcttattacagagcaagggctggtgaagctgctaacttttgtgcacttatcttagcctactgtaataagacagtaggtgagttaggtgatgttagagaaacaatgagttacttgtttcaacatgccaatttagattcttgcaaaagagtcttgaacgtggtgtgtaaaacttgtggacaacagcagacaacccttaagggtgtagaagctgttatgtacatgggcacactttcttatgaacaatttaagaaaggtgttcagataccttgtacgtgtggtaaacaagctacaaaatatctagtacaacaggagtcaccttttgttatgatgtcagcaccacctgctcagtatgaacttaagcatggtacatttacttgtgctagtgagtacactggtaattaccagtgtggtcactataaacatataacttctaaagaaactttgtattgcatagacggtgctttacttacaaagtcctcagaatacaaaggtcctattacggatgttttctacaaagaaaacagttacacaacaaccataaaaccagttacttataaattggatggtgttgtttgtacagaaattgaccctaagttggacaattattataagaaagacaattcttatttcacagagcaaccaattgatcttgtaccaaaccaaccatatccaaacgcaagcttcgataattttaagtttgtatgtgataatatcaaatttgctgatgatttaaaccagttaactggttataagaaacctgcttcaagagagcttaaagttacatttttccctgacttaaatggtgatgtggtggctattgattataaacactacacaccctcttttaagaaaggagctaaattgttacataaacctattgtttggcatgttaacaatgcaactaataaagccacgtataaaccaaatacctggtgtatacgttgtctttggagcacaaaaccagttgaaacatcaaattcgtttgatgtactgaagtcagaggacgcgcagggaatggataatcttgcctgcgaagatctaaaaccagtctctgaagaagtagtggaaaatcctaccatacagaaagacgttcttgagtgtaatgtgaaaactaccgaagttgtaggagacattatacttaaaccagcaaataatagtttaaaaattacagaagaggttggccacacagatctaatggctgcttatgtagacaattctagtcttactattaagaaacctaatgaattatctagagtattaggtttgaaaacccttgctactcatggtttagctgctgttaatagtgtcccttgggatactatagctaattatgctaagccttttcttaacaaagttgttagtacaactactaacatagttacacggtgtttaaaccgtgtttgtactaattatatgccttatttctttactttattgctacaattgtgtacttttactagaagtacaaattctagaattaaagcatctatgccgactactatagcaaagaatactgttaagagtgtcggtaaattttgtctagaggcttcatttaattatttgaagtcacctaatttttctaaactgataaatattataatttggtttttactattaagtgtttgcctaggttctttaatctactcaaccgctgctttaggtgttttaatgtctaatttaggcatgccttcttactgtactggttacagagaaggctatttgaactctactaatgtcactattgcaacctactgtactggttctataccttgtagtgtttgtcttagtggtttagattctttagacacctatccttctttagaaactatacaaattaccatttcatcttttaaatgggatttaactgcttttggcttagttgcagagtggtttttggcatatattcttttcactaggtttttctatgtacttggattggctgcaatcatgcaattgtttttcagctattttgcagtacattttattagtaattcttggcttatgtggttaataattaatcttgtacaaatggccccgatttcagctatggttagaatgtacatcttctttgcatcattttattatgtatggaaaagttatgtgcatgttgtagacggttgtaattcatcaacttgtatgatgtgttacaaacgtaatagagcaacaagagtcgaatgtacaactattgttaatggtgttagaaggtccttttatgtctatgctaatggaggtaaaggcttttgcaaactacacaattggaattgtgttaattgtgatacattctgtgctggtagtacatttattagtgatgaagttgcgagagacttgtcactacagtttaaaagaccaataaatcctactgaccagtcttcttacatcgttgatagtgttacagtgaagaatggttccatccatctttactttgataaagctggtcaaaagacttatgaaagacattctctctctcattttgttaacttagacaacctgagagctaataacactaaaggttcattgcctattaatgttatagtttttgatggtaaatcaaaatgtgaagaatcatctgcaaaatcagcgtctgtttactacagtcagcttatgtgtcaacctatactgttactagatcaggcattagtgtctgatgttggtgatagtgcggaagttgcagttaaaatgtttgatgcttacgttaatacgttttcatcaacttttaacgtaccaatggaaaaactcaaaacactagttgcaactgcagaagctgaacttgcaaagaatgtgtccttagacaatgtcttatctacttttatttcagcagctcggcaagggtttgttgattcagatgtagaaactaaagatgttgttgaatgtcttaaattgtcacatcaatctgacatagaagttactggcgatagttgtaataactatatgctcacctataacaaagttgaaaacatgacaccccgtgaccttggtgcttgtattgactgtagtgcgcgtcatattaatgcgcaggtagcaaaaagtcacaacattgctttgatatggaacgttaaagatttcatgtcattgtctgaacaactacgaaaacaaatacgtagtgctgctaaaaagaataacttaccttttaagttgacatgtgcaactactagacaagttgttaatgttgtaacaacaaagatagcacttaagggtggtaaaattgttaataattggttgaagcagttaattaaagttacacttgtgttcctttttgttgctgctattttctatttaataacacctgttcatgtcatgtctaaacatactgacttttcaagtgaaatcataggatacaaggctattgatggtggtgtcactcgtgacatagcatctacagatacttgttttgctaacaaacatgctgattttgacacatggtttagccagcgtggtggtagttatactaatgacaaagcttgcccattgattgctgcagtcataacaagagaagtgggttttgtcgtgcctggtttgcctggcacgatattacgcacaactaatggtgactttttgcatttcttacctagagtttttagtgcagttggtaacatctgttacacaccatcaaaacttatagagtacactgactttgcaacatcagcttgtgttttggctgctgaatgtacaatttttaaagatgcttctggtaagccagtaccatattgttatgataccaatgtactagaaggttctgttgcttatgaaagtttacgccctgacacacgttatgtgctcatggatggctctattattcaatttcctaacacctaccttgaaggttctgttagagtggtaacaacttttgattctgagtactgtaggcacggcacttgtgaaagatcagaagctggtgtttgtgtatctactagtggtagatgggtacttaacaatgattattacagatctttaccaggagttttctgtggtgtagatgctgtaaatttacttactaatatgtttacaccactaattcaacctattggtgctttggacatatcagcatctatagtagctggtggtattgtagctatcgtagtaacatgccttgcctactattttatgaggtttagaagagcttttggtgaatacagtcatgtagttgcctttaatactttactattccttatgtcattcactgtactctgtttaacaccagtttactcattcttacctggtgtttattctgttatttacttgtacttgacattttatcttactaatgatgtttcttttttagcacatattcagtggatggttatgttcacacctttagtacctttctggataacaattgcttatatcatttgtatttccacaaagcatttctattggttctttagtaattacctaaagagacgtgtagtctttaatggtgtttcctttagtacttttgaagaagctgcgctgtgcacctttttgttaaataaagaaatgtatctaaagttgcgtagtgatgtgctattacctcttacgcaatataatagatacttagctctttataataagtacaagtattttagtggagcaatggatacaactagctacagagaagctgcttgttgtcatctcgcaaaggctctcaatgacttcagtaactcaggttctgatgttctttaccaaccaccacaaacctctatcacctcagctgttttgcagagtggttttagaaaaatggcattcccatctggtaaagttgagggttgtatggtacaagtaacttgtggtacaactacacttaacggtctttggcttgatgacgtagtttactgtccaagacatgtgatctgcacctctgaagacatgcttaaccctaattatgaagatttactcattcgtaagtctaatcataatttcttggtacaggctggtaatgttcaactcagggttattggacattctatgcaaaattgtgtacttaagcttaaggttgatacagccaatcctaagacacctaagtataagtttgttcgcattcaaccaggacagactttttcagtgttagcttgttacaatggttcaccatctggtgtttaccaatgtgctatgaggcccaatttcactattaagggttcattccttaatggttcatgtggtagtgttggttttaacatagattatgactgtgtctctttttgttacatgcaccatatggaattaccaactggagttcatgctggcacagacttagaaggtaacttttatggaccttttgttgacaggcaaacagcacaagcagctggtacggacacaactattacagttaatgttttagcttggttgtacgctgctgttataaatggagacaggtggtttctcaatcgatttaccacaactcttaatgactttaaccttgtggctatgaagtacaattatgaacctctaacacaagaccatgttgacatactaggacctctttctgctcaaactggaattgccgttttagatatgtgtgcttcattaaaagaattactgcaaaatggtatgaatggacgtaccatattgggtagtgctttattagaagatgaatttacaccttttgatgttgttagacaatgctcaggtgttactttccaaagtgcagtgaaaagaacaatcaagggtacacaccactggttgttactcacaattttgacttcacttttagttttagtccagagtactcaatggtctttgttcttttttttgtatgaaaatgcctttttaccttttgctatgggtattattgctatgtctgcttttgcaatgatgtttgtcaaacataagcatgcatttctctgtttgtttttgttaccttctcttgccactgtagcttattttaatatggtctatatgcctgctagttgggtgatgcgtattatgacatggttggatatggttgatactagtttgtctggttttaagctaaaagactgtgttatgtatgcatcagctgtagtgttactaatccttatgacagcaagaactgtgtatgatgatggtgctaggagagtgtggacacttatgaatgtcttgacactcgtttataaagtttattatggtaatgctttagatcaagccatttccatgtgggctcttataatctctgttacttctaactactcaggtgtagttacaactgtcatgtttttggccagaggtattgtttttatgtgtgttgagtattgccctattttcttcataactggtaatacacttcagtgtataatgctagtttattgtttcttaggctatttttgtacttgttactttggcctcttttgtttactcaaccgctactttagactgactcttggtgtttatgattacttagtttctacacaggagtttagatatatgaattcacagggactactcccacccaagaatagcatagatgccttcaaactcaacattaaattgttgggtgttggtggcaaaccttgtatcaaagtagccactgtacagtctaaaatgtcagatgtaaagtgcacatcagtagtcttactctcagttttgcaacaactcagagtagaatcatcatctaaattgtgggctcaatgtgtccagttacacaatgacattctcttagctaaagatactactgaagcctttgaaaaaatggtttcactactttctgttttgctttccatgcagggtgctgtagacataaacaagctttgtgaagaaatgctggacaacagggcaaccttacaagctatagcctcagagtttagttcccttccatcatatgcagcttttgctactgctcaagaagcttatgagcaggctgttgctaatggtgattctgaagttgttcttaaaaagttgaagaagtctttgaatgtggctaaatctgaatttgaccgtgatgcagccatgcaacgtaagttggaaaagatggctgatcaagctatgacccaaatgtataaacaggctagatctgaggacaagagggcaaaagttactagtgctatgcagacaatgcttttcactatgcttagaaagttggataatgatgcactcaacaacattatcaacaatgcaagagatggttgtgttcccttgaacataatacctcttacaacagcagccaaactaatggttgtcataccagactataacacatataaaaatacgtgtgatggtacaacatttacttatgcatcagcattgtgggaaatccaacaggttgtagatgcagatagtaaaattgttcaacttagtgaaattagtatggacaattcacctaatttagcatggcctcttattgtaacagctttaagggccaattctgctgtcaaattacagaataatgagcttagtcctgttgcactacgacagatgtcttgtgctgccggtactacacaaactgcttgcactgatgacaatgcgttagcttactacaacacaacaaagggaggtaggtttgtacttgcactgttatccgatttacaggatttgaaatgggctagattccctaagagtgatggaactggtactatctatacagaactggaaccaccttgtaggtttgttacagacacacctaaaggtcctaaagtgaagtatttatactttattaaaggattaaacaacctaaatagaggtatggtacttggtagtttagctgccacagtacgtctacaagctggtaatgcaacagaagtgcctgccaattcaactgtattatctttctgtgcttttgctgtagatgctgctaaagcttacaaagattatctagctagtgggggacaaccaatcactaattgtgttaagatgttgtgtacacacactggtactggtcaggcaataacagttacaccggaagccaatatggatcaagaatcctttggtggtgcatcgtgttgtctgtactgccgttgccacatagatcatccaaatcctaaaggattttgtgacttaaaaggtaagtatgtacaaatacctacaacttgtgctaatgaccctgtgggttttacacttaaaaacacagtctgtaccgtctgcggtatgtggaaaggttatggctgtagttgtgatcaactccgcgaacccatgcttcagtcagctgatgcacaatcgtttttaaacgggtttgcggtgtaagtgcagcccgtcttacaccgtgcggcacaggcactagtactgatgtcgtatacagggcttttgacatctacaatgataaagtagctggttttgctaaattcctaaaaactaattgttgtcgcttccaagaaaaggacgaagatgacaatttaattgattcttactttgtagttaagagacacactttctctaactaccaacatgaagaaacaatttataatttacttaaggattgtccagctgttgctaaacatgacttctttaagtttagaatagacggtgacatggtaccacatatatcacgtcaacgtcttactaaatacacaatggcagacctcgtctatgctttaaggcattttgatgaaggtaattgtgacacattaaaagaaatacttgtcacatacaattgttgtgatgatgattatttcaataaaaaggactggtatgattttgtagaaaacccagatatattacgcgtatacgccaacttaggtgaacgtgtacgccaagctttgttaaaaacagtacaattctgtgatgccatgcgaaatgctggtattgttggtgtactgacattagataatcaagatctcaatggtaactggtatgatttcggtgatttcatacaaaccacgccaggtagtggagttcctgttgtagattcttattattcattgttaatgcctatattaaccttgaccagggctttaactgcagagtcacatgttgacactgacttaacaaagccttacattaagtgggatttgttaaaatatgacttcacggaagagaggttaaaactctttgaccgttattttaaatattgggatcagacataccacccaaattgtgttaactgtttggatgacagatgcattctgcattgtgcaaactttaatgttttattctctacagtgttcccacctacaagttttggaccactagtgagaaaaatatttgttgatggtgttccatttgtagtttcaactggataccacttcagagagctaggtgttgtacataatcaggatgtaaacttacatagctctagacttagttttaaggaattacttgtgtatgctgctgaccctgctatgcacgctgcttctggtaatctattactagataaacgcactacgtgcttttcagtagctgcacttactaacaatgttgcttttcaaactgtcaaacccggtaattttaacaaagacttctatgactttgctgtgtctaagggtttctttaaggaaggaagttctgttgaattaaaacacttcttctttgctcaggatggtaatgctgctatcagcgattatgactactatcgttataatctaccaacaatgtgtgatatcagacaactactatttgtagttgaagttgttgataagtactttgattgttacgatggtggctgtattaatgctaaccaagtcatcgtcaacaacctagacaaatcagctggttttccatttaataaatggggtaaggctagactttattatgattcaatgagttatgaggatcaagatgcacttttcgcatatacaaaacgtaatgtcatccctactataactcaaatgaatcttaagtatgccattagtgcaaagaatagagctcgcaccgtagctggtgtctctatctgtagtactatgaccaatagacagtttcatcaaaaattattgaaatcaatagccgccactagaggagctactgtagtaattggaacaagcaaattctatggtggttggcacaacatgttaaaaactgtttatagtgatgtagaaaaccctcaccttatgggttgggattatcctaaatgtgatagagccatgcctaacatgcttagaattatggcctcacttgttcttgctcgcaaacatacaacgtgttgtagcttgtcacaccgtttctatagattagctaatgagtgtgctcaagtattgagtgaaatggtcatgtgtggcggttcactatatgttaaaccaggtggaacctcatcaggagatgccacaactgcttatgctaatagtgtttttaacatttgtcaagctgtcacggccaatgttaatgcacttttatctactgatggtaacaaaattgccgataagtatgtccgcaatttacaacacagactttatgagtgtctctatagaaatagagatgttgacacagactttgtgaatgagttttacgcatatttgcgtaaacatttctcaatgatgatactctctgacgatgctgttgtgtgtttcaatagcacttatgcatctcaaggtctagtggctagcataaagaactttaagtcagttctttattatcaaaacaatgtttttatgtctgaagcaaaatgttggactgagactgaccttactaaaggacctcatgaattttgctctcaacatacaatgctagttaaacagggtgatgattatgtgtaccttccttacccagatccatcaagaatcctaggggccggctgttttgtagatgatatcgtaaaaacagatggtacacttatgattgaacggttcgtgtctttagctatagatgcttacccacttactaaacatcctaatcaggagtatgctgatgtctttcatttgtacttacaatacataagaaagctacatgatgagttaacaggacacatgttagacatgtattctgttatgcttactaatgataacacttcaaggtattgggaacctgagttttatgaggctatgtacacaccgcatacagtcttacaggctgttggggcttgtgttctttgcaattcacagacttcattaagatgtggtgcttgcatacgtagaccattcttatgttgtaaatgctgttacgaccatgtcatatcaacatcacataaattagtcttgtctgttaatccgtatgtttgcaatgctccaggttgtgatgtcacagatgtgactcaactttacttaggaggtatgagctattattgtaaatcacataaaccacccattagttttccattgtgtgctaatggacaagtttttggtttatataaaaatacatgtgttggtagcgataatgttactgactttaatgcaattgcaacatgtgactggacaaatgctggtgattacattttagctaacacctgtactgaaagactcaagctttttgcagcagaaacgctcaaagctactgaggagacatttaaactgtcttatggtattgctactgtacgtgaagtgctgtctgacagagaattacatctttcatgggaagttggtaaacctagaccaccacttaaccgaaattatgtctttactggttatcgtgtaactaaaaacagtaaagtacaaataggagagtacacctttgaaaaaggtgactatggtgatgctgttgtttaccgaggtacaacaacttacaaattaaatgttggtgattattttgtgctgacatcacatacagtaatgccattaagtgcacctacactagtgccacaagagcactatgttagaattactggcttatacccaacactcaatatctcagatgagttttctagcaatgttgcaaattatcaaaaggttggtatgcaaaagtattctacactccagggaccacctggtactggtaagagtcattttgctattggcctagctctctactacccttctgctcgcatagtgtatacagcttgctctcatgccgctgttgatgcactatgtgagaaggcattaaaatatttgcctatagataaatgtagtagaattatacctgcacgtgctcgtgtagagtgttttgataaattcaaagtgaattcaacattagaacagtatgtcttttgtactgtaaatgcattgcctgagacgacagcagatatagttgtctttgatgaaatttcaatggccacaaattatgatttgagtgttgtcaatgccagattacgtgctaagcactatgtgtacattggcgaccctgctcaattacctgcaccacgcacattgctaactaagggcacactagaaccagaatatttcaattcagtgtgtagacttatgaaaactataggtccagacatgttcctcggaacttgtcggcgttgtcctgctgaaattgttgacactgtgagtgctttggtttatgataataagcttaaagcacataaagacaaatcagctcaatgctttaaaatgttttataagggtgttatcacgcatgatgtttcatctgcaattaacaggccacaaataggcgtggtaagagaattccttacacgtaaccctgcttggagaaaagctgtctttatttcaccttataattcacagaatgctgtagcctcaaagattttgggactaccaactcaaactgttgattcatcacagggctcagaatatgactatgtcatattcactcaaaccactgaaacagctcactcttgtaatgtaaacagatttaatgttgctattaccagagcaaaagtaggcatactttgcataatgtctgatagagacctttatgacaagttgcaatttacaagtcttgaaattccacgtaggaatgtggcaactttacaagctgaaaatgtaacaggactctttaaagattgtagtaaggtaatcactgggttacatcctacacaggcacctacacacctcagtgttgacactaaattcaaaactgaaggtttatgtgttgacatacctggcatacctaaggacatgacctatagaagactcatctctatgatgggttttaaaatgaattatcaagttaatggttaccctaacatgtttatcacccgcgaagaagctataagacatgtacgtgcatggattggcttcgatgtcgaggggtgtcatgctactagagaagctgttggtaccaatttacctttacagctaggtttttctacaggtgttaacctagttgctgtacctacaggttatgttgatacacctaataatacagatttttccagagttagtgctaaaccaccgcctggagatcaatttaaacacctcataccacttatgtacaaaggacttccttggaatgtagtgcgtataaagattgtacaaatgttaagtgacacacttaaaaatctctctgacagagtcgtatttgtcttatgggcacatggctttgagttgacatctatgaagtattttgtgaaaataggacctgagcgcacctgttgtctatgtgatagacgtgccacatgcttttccactgcttcagacacttatgcctgttggcatcattctattggatttgattacgtctataatccgtttatgattgatgttcaacaatggggttttacaggtaacctacaaagcaaccatgatctgtattgtcaagtccatggtaatgcacatgtagctagttgtgatgcaatcatgactaggtgtctagctgtccacgagtgctttgttaagcgtgttgactggactattgaatatcctataattggtgatgaactgaagattaatgcggcttgtagaaaggttcaacacatggttgttaaagctgcattattagcagacaaattcccagttcttcacgacattggtaaccctaaagctattaagtgtgtacctcaagctgatgtagaatggaagttctatgatgcacagccttgtagtgacaaagcttataaaatagaagaattattctattcttatgccacacattctgacaaattcacagatggtgtatgcctattttggaattgcaatgtcgatagatatcctgctaattccattgtttgtagatttgacactagagtgctatctaaccttaacttgcctggttgtgatggtggcagtttgtatgtaaataaacatgcattccacacaccagcttttgataaaagtgcttttgttaatttaaaacaattaccatttttctattactctgacagtccatgtgagtctcatggaaaacaagtagtgtcagatatagattatgtaccactaaagtctgctacgtgtataacacgttgcaatttaggtggtgctgtctgtagacatcatgctaatgagtacagattgtatctcgatgcttataacatgatgatctcagctggctttagcttgtgggtttacaaacaatttgatacttataacctctggaacacttttacaagacttcagagtttagaaaatgtggcttttaatgttgtaaataagggacactttgatggacaacagggtgaagtaccagtttctatcattaataacactgtttacacaaaagttgatggtgttgatgtagaattgtttgaaaataaaacaacattacctgttaatgtagcatttgagctttgggctaagcgcaacattaaaccagtaccagaggtgaaaatactcaataatttgggtgtggacattgctgctaatactgtgatctgggactacaaaagagatgctccagcacatatatctactattggtgtttgttctatgactgacatagccaagaaaccaactgaaacgatttgtgcaccactcactgtcttttttgatggtagagttgatggtcaagtagacttatttagaaatgcccgtaatggtgttcttattacagaaggtagtgttaaaggtttacaaccatctgtaggtcccaaacaagctagtcttaatggagtcacattaattggagaagccgtaaaaacacagttcaattattataagaaagttgatggtgttgtccaacaattacctgaaacttactttactcagagtagaaatttacaagaatttaaacccaggagtcaaatggaaattgatttcttagaattagctatggatgaattcattgaacggtataaattagaaggctatgccttcgaacatatcgtttatggagattttagtcatagtcagttaggtggtttacatctactgattggactagctaaacgttttaaggaatcaccttttgaattagaagattttattcctatggacagtacagttaaaaactatttcataacagatgcgcaaacaggttcatctaagtgtgtgtgttctgttattgatttattacttgatgattttgttgaaataataaaatcccaagatttatctgtagtttctaaggttgtcaaagtgactattgactatacagaaatttcatttatgctttggtgtaaagatggccatgtagaaacattttacccaaaattacaatctagtcaagcgtggcaaccgggtgttgctatgcctaatctttacaaaatgcaaagaatgctattagaaaagtgtgaccttcaaaattatggtgatagtgcaacattacctaaaggcataatgatgaatgtcgcaaaatatactcaactgtgtcaatatttaaacacattaacattagctgtaccctataatatgagagttatacattttggtgctggttctgataaaggagttgcaccaggtacagctgttttaagacagtggttgcctacgggtacgctgcttgtcgattcagatcttaatgactttgtctctgatgcagattcaactttgattggtgattgtgcaactgtacatacagctaataaatgggatctcattattagtgatatgtacgaccctaagactaaaaatgttacaaaagaaaatgactctaaagagggttttttcacttacatttgtgggtttatacaacaaaagctagctcttggaggttccgtggctataaagataacagaacattcttggaatgctgatctttataagctcatgggacacttcgcatggtggacagcctttgttactaatgtgaatgcgtcatcatctgaagcatttttaattggatgtaattatcttggcaaaccacgcgaacaaatagatggttatgtcatgcatgcaaattacatattttggaggaatacaaatccaattcagttgtcttcctattctttatttgacatgagtaaatttccccttaaattaaggggtactgctgttatgtctttaaaagaaggtcaaatcaatgatatgattttatctcttcttagtaaaggtagacttataattagagaaaacaacagagttgttatttctagtgatgttcttgttaacaactaaacgaacaatgtttgtttttcttgttttattgccactagtctctagtcagtgtgttaatcttacaaccagaactcaattaccccctgcatacactaattctttcacacgtggtgtttattaccctgacaaagttttcagatcctcagttttacattcaactcaggacttgttcttacctttcttttccaatgttacttggttccatgctatacatgtctctgggaccaatggtactaagaggtttgataaccctgtcctaccatttaatgatggtgtttattttgcttccactgagaagtctaacataataagaggctggatttttggtactactttagattcgaagacccagtccctacttattgttaataacgctactaatgttgttattaaagtctgtgaatttcaattttgtaatgatccatttttgggtgtttattaccacaaaaacaacaaaagttggatggaaagtgagttcagagtttattctagtgcgaataattgcacttttgaatatgtctctcagccttttcttatggaccttgaaggaaaacagggtaatttcaaaaatcttagggaatttgtgtttaagaatattgatggttattttaaaatatattctaagcacacgcctattaatttagtgcgtgatctccctcagggtttttcggctttagaaccattggtagatttgccaataggtattaacatcactaggtttcaaactttacttgctttacatagaagttatttgactcctggtgattcttcttcaggttggacagctggtgctgcagcttattatgtgggttatcttcaacctaggacttttctattaaaatataatgaaaatggaaccattacagatgctgtagactgtgcacttgaccctctctcagaaacaaagtgtacgttgaaatccttcactgtagaaaaaggaatctatcaaacttctaactttagagtccaaccaacagaatctattgttagatttcctaatattacaaacttgtgcccttttggtgaagtttttaacgccaccagatttgcatctgtttatgcttggaacaggaagagaatcagcaactgtgttgctgattattctgtcctatataattccgcatcattttccacttttaagtgttatggagtgtctcctactaaattaaatgatctctgctttactaatgtctatgcagattcatttgtaattagaggtgatgaagtcagacaaatcgctccagggcaaactggaaagattgctgattataattataaattaccagatgattttacaggctgcgttatagcttggaattctaacaatcttgattctaaggttggtggtaattataattacctgtatagattgtttaggaagtctaatctcaaaccttttgagagagatatttcaactgaaatctatcaggccggtagcacaccttgtaatggtgttgaaggttttaattgttactttcctttacaatcatatggtttccaacccactaatggtgttggttaccaaccatacagagtagtagtactttcttttgaacttctacatgcaccagcaactgtttgtggacctaaaaagtctactaatttggttaaaaacaaatgtgtcaatttcaacttcaatggtttaacaggcacaggtgttcttactgagtctaacaaaaagtttctgcctttccaacaatttggcagagacattgctgacactactgatgctgtccgtgatccacagacacttgagattcttgacattacaccatgttcttttggtggtgtcagtgttataacaccaggaacaaatacttctaaccaggttgctgttctttatcaggatgttaactgcacagaagtccctgttgctattcatgcagatcaacttactcctacttggcgtgtttattctacaggttctaatgtttttcaaacacgtgcaggctgtttaataggggctgaacatgtcaacaactcatatgagtgtgacatacccattggtgcaggtatatgcgctagttatcagactcagactaattctcctcggcgggcacgtagtgtagctagtcaatccatcattgcctacactatgtcacttggtgcagaaaattcagttgcttactctaataactctattgccatacccacaaattttactattagtgttaccacagaaattctaccagtgtctatgaccaagacatcagtagattgtacaatgtacatttgtggtgattcaactgaatgcagcaatcttttgttgcaatatggcagtttttgtacacaattaaaccgtgctttaactggaatagctgttgaacaagacaaaaacacccaagaagtttttgcacaagtcaaacaaatttacaaaacaccaccaattaaagattttggtggttttaatttttcacaaatattaccagatccatcaaaaccaagcaagaggtcatttattgaagatctacttttcaacaaagtgacacttgcagatgctggcttcatcaaacaatatggtgattgccttggtgatattgctgctagagacctcatttgtgcacaaaagtttaacggccttactgttttgccacctttgctcacagatgaaatgattgctcaatacacttctgcactgttagcgggtacaatcacttctggttggacctttggtgcaggtgctgcattacaaataccatttgctatgcaaatggcttataggtttaatggtattggagttacacagaatgttctctatgagaaccaaaaattgattgccaaccaatttaatagtgctattggcaaaattcaagactcactttcttccacagcaagtgcacttggaaaacttcaagatgtggtcaaccaaaatgcacaagctttaaacacgcttgttaaacaacttagctccaattttggtgcaatttcaagtgttttaaatgatatcctttcacgtcttgacaaagttgaggctgaagtgcaaattgataggttgatcacaggcagacttcaaagtttgcagacatatgtgactcaacaattaattagagctgcagaaatcagagcttctgctaatcttgctgctactaaaatgtcagagtgtgtacttggacaatcaaaaagagttgatttttgtggaaagggctatcatcttatgtccttccctcagtcagcacctcatggtgtagtcttcttgcatgtgacttatgtccctgcacaagaaaagaacttcacaactgctcctgccatttgtcatgatggaaaagcacactttcctcgtgaaggtgtctttgtttcaaatggcacacactggtttgtaacacaaaggaatttttatgaaccacaaatcattactacagacaacacatttgtgtctggtaactgtgatgttgtaataggaattgtcaacaacacagtttatgatcctttgcaacctgaattagactcattcaaggaggagttagataaatattttaagaatcatacatcaccagatgttgatttaggtgacatctctggcattaatgcttcagttgtaaacattcaaaaagaaattgaccgcctcaatgaggttgccaagaatttaaatgaatctctcatcgatctccaagaacttggaaagtatgagcagtatataaaatggccatggtacatttggctaggttttatagctggcttgattgccatagtaatggtgacaattatgctttgctgtatgaccagttgctgtagttgtctcaagggctgttgttcttgtggatcctgctgcaaatttgatgaagacgactctgagccagtgctcaaaggagtcaaattacattacacataaacgaacttatggatttgtttatgagaatcttcacaattggaactgtaactttgaagcaaggtgaaatcaaggatgctactccttcagattttgttcgcgctactgcaacgataccgatacaagcctcactccctttcggatggcttattgttggcgttgcacttcttgctgtttttcagagcgcttccaaaatcataaccctcaaaaagagatggcaactagcactctccaagggtgttcactttgtttgcaacttgctgttgttgtttgtaacagtttactcacaccttttgctcgttgctgctggccttgaagccccttttctctatctttatgctttagtctacttcttgcagagtataaactttgtaagaataataatgaggctttggctttgctggaaatgccgttccaaaaacccattactttatgatgccaactattttctttgctggcatactaattgttacgactattgtataccttacaatagtgtaacttcttcaattgtcattacttcaggtgatggcacaacaagtcctatttctgaacatgactaccagattggtggttatactgaaaaatgggaatctggagtaaaagactgtgttgtattacacagttacttcacttcagactattaccagctgtactcaactcaattgagtacagacactggtgttgaacatgttaccttcttcatctacaataaaattgttgatgagcctgaagaacatgtccaaattcacacaatcgacgtttcatccggagttgttaatccagtaatggaaccaatttatgatgaaccgacgacgactactagcgtgcctttgtaagcacaagctgatgagtacgaacttatgtactcattcgtttcggaagagacaggtacgttaatagttaatagcgtacttctttttcttgctttcgtggtattcttgctagttacactagccatccttactgcgcttcgattgtgtgcgtactgctgcaatattgttaacgtgagtcttgtaaaaccttctttttacgtttactctcgtgttaaaaatctgaattcttctagagttcctgatcttctggtctaaacgaactaaatattatattagtttttctgtttggaactttaattttagccatggcagattccaacggtactattaccgttgaagagcttaaaaagctccttgaacaatggaacctagtaataggtttcctattccttacatggatttgtcttctacaatttgcctatgccaacaggaataggtttttgtatataattaagttaattttcctctggctgttatggccagtaactttagcttgttttgtgcttgctgctgtttacagaataaattggatcaccggtggaattgctatcgcaatggcttgtcttgtaggcttgatgtggctcagctacttcattgcttctttcagactgtttgcgcgtacgcgttccatgtggtcattcaatccagaaactaacattcttctcaacgtgccactccatggcactattctgaccagaccgcttctagaaagtgaactcgtaatcggagctgtgatccttcgtggacatcttcgtattgctggacaccatctaggacgctgtgacatcaaggacctgcctaaagaaatcactgttgctacatcacgaacgctttcttattacaaattgggagcttcgcagcgtgtagcaggtgactcaggttttgctgcatacagtcgctacaggattggcaactataaattaaacacagaccattccagtagcagtgacaatattgctttgcttgtacagtaagtgacaacagatgtttcatctcgttgactttcaggttactatagcagagatattactaattattatgaggacttttaaagtttccatttggaatcttgattacatcataaacctcataattaaaaatttatctaagtcactaactgagaataaatattctcaattagatgaagagcaaccaatggagattgattaaacgaacatgaaaattattcttttcttggcactgataacactcgctacttgtgagctttatcactaccaagagtgtgttagaggtacaacagtacttttaaaagaaccttgctcttctggaacatacgagggcaattcaccatttcatcctctagctgataacaaatttgcactgacttgctttagcactcaatttgcttttgcttgtcctgacggcgtaaaacacgtctatcagttacgtgccagatcagtttcacctaaactgttcatcagacaagaggaagttcaagaactttactctccaatttttcttattgttgcggcaatagtgtttataacactttgcttcacactcaaaagaaagacagaatgattgaactttcattaattgacttctatttgtgctttttagcctttctgctattccttgttttaattatgcttattatcttttggttctcacttgaactgcaagatcataatgaaacttgtcacgcctaaacgaacatgaaatttcttgttttcttaggaatcatcacaactgtagctgcatttcaccaagaatgtagtttacagtcatgtactcaacatcaaccatatgtagttgatgacccgtgtcctattcacttctattctaaatggtatattagagtaggagctagaaaatcagcacctttaattgaattgtgcgtggatgaggctggttctaaatcacccattcagtacatcgatatcggtaattatacagtttcctgtttaccttttacaattaattgccaggaacctaaattgggtagtcttgtagtgcgttgttcgttctatgaagactttttagagtatcatgacgttcgtgttgttttagatttcatctaaacgaacaaactaaaatgtctgataatggaccccaaaatcagcgaaatgcaccccgcattacgtttggtggaccctcagattcaactggcagtaaccagaatggagaacgcagtggggcgcgatcaaaacaacgtcggccccaaggtttacccaataatactgcgtcttggttcaccgctctcactcaacatggcaaggaagaccttaaattccctcgaggacaaggcgttccaattaacaccaatagcagtccagatgaccaaattggctactaccgaagagctaccagacgaattcgtggtggtgacggtaaaatgaaagatctcagtccaagatggtatttctactacctaggaactgggccagaagctggacttccctatggtgctaacaaagacggcatcatatgggttgcaactgagggagccttgaatacaccaaaagatcacattggcacccgcaatcctgctaacaatgctgcaatcgtgctacaacttcctcaaggaacaacattgccaaaaggcttctacgcagaagggagcagaggcggcagtcaagcctcttctcgttcctcatcacgtagtcgcaacagttcaagaaattcaactccaggcagcagtaggggaacttctcctgctagaatggctggcaatggcggtgatgctgctcttgctttgctgctgcttgacagattgaaccagcttgagagcaaaatgtctggtaaaggccaacaacaacaaggccaaactgtcactaagaaatctgctgctgaggcttctaagaagcctcggcaaaaacgtactgccactaaagcatacaatgtaacacaagctttcggcagacgtggtccagaacaaacccaaggaaattttggggaccaggaactaatcagacaaggaactgattacaaacattggccgcaaattgcacaatttgcccccagcgcttcagcgttcttcggaatgtcgcgcattggcatggaagtcacaccttcgggaacgtggttgacctacacaggtgccatcaaattggatgacaaagatccaaatttcaaagatcaagtcattttgctgaataagcatattgacgcatacaaaacattcccaccaacagagcctaaaaaggacaaaaagaagaaggctgatgaaactcaagccttaccgcagagacagaagaaacagcaaactgtgactcttcttcctgctgcagatttggatgatttctccaaacaattgcaacaatccatgagcagtgctgactcaactcaggcctaaactcatgcagaccacacaaggcagatgggctatataaacgttttcgcttttccgtttacgatatatagtctactcttgtgcagaatgaattctcgtaactacatagcacaagtagatgtagttaactttaatctcacatagcaatctttaatcagtgtgtaacattagggaggacttgaaagagccaccacattttcaccgaggccacgcggagtacgatcgagtgtacagtgaacaatgctagggagagctgcctatatggaagagccctaatgtgtaaaattaattttagtagtgctatccccatgtgattttaatagcttcttaggagaat

SEQ ID NO: 11 - DNA, 13817 bp, synthetic construct
  misc_feature 1..13817: note = Vector with ORF7a
  source 1..13817: mol_type = other DNA
gcccgctttccagtcgggaaacctgtcgtgccagctgcattaatgaatcggccaacgcgcggggagaggcggtttgcgtattgggcgctcttccgcttcctcgctcactgactcgctgcgctcggtcgttcggctgcggcgagcggtatcagctcactcaaaggcggtaatacggttatccacagaatcaggggataacgcaggaaagaacatgtgagcaaaaggccagcaaaaggccaggaaccgtaaaaaggccgcgttgctggcgtttttccataggctccgcccccctgacgagcatcacaaaaatcgacgctcaagtcagaggtggcgaaacccgacaggactataaagataccaggcgtttccccctggaagctccctcgtgcgctctcctgttccgaccctgccgcttaccggatacctgtccgcctttctcccttcgggaagcgtggcgctttctcatagctcacgctgtaggtatctcagttcggtgtaggtcgttcgctccaagctgggctgtgtgcacgaaccccccgttcagcccgaccgctgcgccttatccggtaactatcgtcttgagtccaacccggtaagacacgacttatcgccactggcagcagccactggtaacaggattagcagagcgaggtatgtaggcggtgctacagagttcttgaagtggtggcctaactacggctacactagaagaacagtatttggtatctgcgctctgctgaagccagttaccttcggaaaaagagttggtagctcttgatccggcaaacaaaccaccgctggtagcggtggtttttttgtttgcaagcagcagattacgcgcagaaaaaaaggatctcaagaagatcctttgatcttttctacggggtctgacgctcagtggaacgaaaactcacgttaagggattttggtcatgagattatcaaaaaggatcttcacctagatccttttaaattaaaaatgaagttttaaatcaatctaaagtatatatgagtaaacttggtctgacagttaccaatgcttaatcagtgaggcacctatctcagcgatctgtctatttcgttcatccatagttgcctgactccccgtcgtgtagataactacgatacgggagggcttaccatctggccccagtgctgcaatgataccgcgagacccacgctcaccggctccagatttatcagcaataaaccagccagccggaagggccgagcgcagaagtggtcctgcaactttatccgcctccatccagtctattaattgttgccgggaagctagagtaagtagttcgccagttaatagtttgcgcaacgttgttgccattgctacaggcatcgtggtgtcacgctcgtcgtttggtatggcttcattcagctccggttcccaacgatcaaggcgagttacatgatcccccatgttgtgcaaaaaagcggttagctccttcggtcctccgatcgttgtcagaagtaagttggccgcagtgttatcactcatggttatggcagcactgcataattctcttactgtcatgccatccgtaagatgcttttctgtgactggtgagtactcaaccaagtcattctgagaatagtgtatgcggcgaccgagttgctcttgcccggcgtcaatacgggataataccgcgccacatagcagaactttaaaagtgctcatcattggaaaacgttcttcggggcgaaaactctcaaggatcttaccgctgttgagatccagttcgatgtaacccactcgtgcacccaactgatcttcagcatcttttactttcaccagcgtttctgggtgagcaaaaacaggaaggcaaaatgccgcaaaaaagggaataagggcgacacggaaatgttgaatactcatactcttcctttttcaatattattgaagcatttatcagggttattgtctcatgagcggatacatatttgaatgtatttagaaaaataaacaaataggggttccgcgcacatttccccgaaaagtgccacctgacgtctaagaaaccattattatcatgacattaacctataaaaataggcgtatcacgaggccctttcgtctcgcgcgtttcggtgatgacggtgaaaacctctgacacatgcagctcccggagacggtcacagcttgtctgtaagcggatgccgggagcagacaagcccgtcagggcgcgtcagcgggtgttggcgggtgtcggggctggcttaactatgcggcatcagagcagattgtactgagagtgcaccatatgcggtgtgaaataccgcacagatgcgtaaggagaaaataccgcatcaggcgccattcgccattcaggctgcgcaactgttgggaagggcgatcggtgcgggcctcttcgctattacgccagctggcgaaagggggatgtgctgcaaggcgattaagttgggtaacgccagggttttcccagtcacgacgttgtaaaacgacggccagtgaattcgagctcggtacctcgcgaatgcatctagatcgtctctcagatcttaatgactttgtctctgatgcagattcaactttgattggtgattgtgcaactgtacatacagctaataaatgggatctcattattagtgatatgtacgaccctaagactaaaaatgttacaaaagaaaatgactctaaagagggttttttcacttacatttgtgggtttatacaacaaaagctagctcttggaggttccgtggctataaagataacagaacattcttggaatgctgatctttataagctcatgggacacttcgcatggtggacagcctttgttactaatgtgaatgcgtcatcatctgaagcatttttaattggatgtaattatcttggcaaaccacgcgaacaaatagatggttatgtcatgcatgcaaattacatattttggaggaatacaaatccaattcagttgtcttcctattctttatttgacatgagtaaatttccccttaaattaaggggtactgctgttatgtctttaaaagaaggtcaaatcaatgatatgattttatctcttcttagtaaaggtagacttataattagagaaaacaacagagttgttatttctagtgatgttcttgttaacaactaaacgaacaatgtttgtttttcttgttttattgccactagtctctagtcagtgtgttaatcttacaaccagaactcaattaccccctgcatacactaattctttcacacgtggtgtttattaccctgacaaagttttcagatcctcagttttacattcaactcaggacttgttcttacctttcttttccaatgttacttggttccatgctatatctgggaccaatggtactaagaggtttgataaccctgtcctaccatttaatgatggtgtttattttgcttccactgagaagtctaacataataagaggctggatttttggtactactttagattcgaagacccagtccctacttattgttaataacgctactaatgttgttattaaagtctgtgaatttcaattttgtaatgatccatttttgggtgtttattaccacaaaaacaacaaaagttggatggaaagtgagttcagagtttattctagtgcgaataattgcacttttgaatatgtctctcagccttttcttatggaccttgaaggaaaacagggtaatttcaaaaatcttagggaatttgtgtttaagaatattgatggttattttaaaatatattctaagcacacgcctattaatttagtgcgtgatctccctcagggtttttcggctttagaaccattggtagatttgccaataggtattaacatcactaggtttcaaactttacttgctttacatagaagttatttgactcctggtgattcttcttcaggttggacagctggtgctgcagcttattatgtgggttatcttcaacctaggacttttctattaaaatataatgaaaatggaaccattacagatgctgtagactgtgcacttgaccctctctcagaaacaaagtgtacgttgaaatccttcactgtagaaaaaggaatctatcaaacttctaactttagagtccaaccaacagaatctattgttagatttcctaatattacaaacttgtgcccttttggtgaagtttttaacgccaccagatttgcatctgtttatgcttggaacaggaagagaatcagcaactgtgttgctgattattctgtcctatataattccgcatcattttccacttttaagtgttatggagtgtctcctactaaattaaatgatctctgctttactaatgtctatgcagattcatttgtaattagaggtgatgaagtcagacaaatcgctccagggcaaactggaaagattgctgattataattataaattaccagatgattttacaggctgcgttatagcttggaattctaacaatcttgattctaaggttggtggtaattataattacctgtatagattgtttaggaagtctaatctcaaaccttttgagagagatatttcaactgaaatctatcaggccggtagcacaccttgtaatggtgttaaaggttttaattgttactttcctttacaatcatatggtttccaacccacttatggtgttggttaccaaccatacagagtagtagtactttcttttgaacttctacatgcaccagcaactgtttgtggacctaaaaagtctactaatttggttaaaaacaaatgtgtcaatttcaacttcaatggtttaacaggcacaggtgttcttactgagtctaacaaaaagtttctgcctttccaacaatttggcagcgacattgctgacactactgatgctgtccgtgatccacagacacttgagattcttgacattacaccatgttcttttggtggtgtcagtgttataacaccaggaacaaatacttctaaccaggttgctgttctttatcagggtgttaactgcacagaagtccctgttgctattcatgcagatcaacttactcctacttggcgtgtttattctacaggttctaatgtttttcaaacacgtgcaggctgtttaataggggctgaacatgtcaacaactcatatgagtgtgacatacccattggtgcaggtatatgcgctagttatcagactcagactaattctcctcggcgggcacgtagtgtagctagtcaatccatcattgcctacactatgtcacttggtgcagaaaattcagttgcttactctaataactctattgccatacccacaaattttactattagtgttaccacagaaattctaccagtgtctatgaccaagacatcagtagattgtacaatgtacatttgtggtgattcaactgaatgcagcaatcttttgttgcaatatggcagtttttgtacacaattaaaccgtgctttaactggaatagctgttgaacaagacaaaaacacccaagaagtttttgcacaagtcaaacaaatttacaaaacaccaccaattaaagattttggtggttttaatttttcacaaatattaccagatccatcaaaaccaagcaagaggtcatttattgaagatctacttttcaacaaagtgacacttgcagatgctggcttcatcaaacaatatggtgattgccttggtgatattgctgctagagacctcatttgtgcacaaaagtttaacggccttactgttttgccacctttgctcacagatgaaatgattgctcaatacacttctgcactgttagcgggtacaatcacttctggttggacctttggtgcaggtgctgcattacaaataccatttgctatgcaaatggcttataggtttaatggtattggagttacacagaatgttctctatgagaaccaaaaattgattgccaaccaatttaatagtgctattggcaaaattcaagactcactttcttccacagcaagtgcacttggaaaacttcaagatgtggtcaaccaaaatgcacaagctttaaacacgcttgttaaacaacttagctccaattttggtgcaatttcaagtgttttaaatgatatcctttcacgtcttgacaaagttgaggctgaagtgcaaattgataggttgatcacaggcagacttcaaagtttgcagacatatgtgactcaacaattaattagagctgcagaaatcagagcttctgctaatcttgctgctactaaaatgtcagagtgtgtacttggacaatcaaaaagagttgatttttgtggaaagggctatcatcttatgtccttccctcagtcagcacctcatggtgtagtcttcttgcatgtgacttatgtccctgcacaagaaaagaacttcacaactgctcctgccatttgtcatgatggaaaagcacactttcctcgtgaaggtgtctttgtttcaaatggcacacactggtttgtaacacaaaggaatttttatgaaccacaaatcattactacagacaacacatttgtgtctggtaactgtgatgttgtaataggaattgtcaacaacacagtttatgatcctttgcaacctgaattagactcattcaaggaggagttagataaatattttaagaatcatacatcaccagatgttgatttaggtgacatctctggcattaatgcttcagttgtaaacattcaaaaagaaattgaccgcctcaatgaggttgccaagaatttaaatgaatctctcatcgatctccaagaacttggaaagtatgagcagtatataaaatggccatggtacatttggctaggttttatagctggcttgattgccatagtaatggtgacaattatgctttgctgtatgaccagttgctgtagttgtctcaagggctgttgttcttgtggatcctgctgcaaatttgatgaagacgactctgagccagtgctcaaaggagtcaaattacattacacataaacgaacttatggatttgtttatgagaatcttcacaattggaactgtaactttgaagcaaggtgaaatcaaggatgctactccttcagattttgttcgcgctactgcaacgataccgatacaagcctcactccctttcggatggcttattgttggcgttgcacttcttgctgtttttcagagcgcttccaaaatcataaccctcaaaaagagatggcaactagcactctccaagggtgttcactttgtttgcaacttgctgttgttgtttgtaacagtttactcacaccttttgctcgttgctgctggccttgaagccccttttctctatctttatgctttagtctacttcttgcagagtataaactttgtaagaataataatgaggctttggctttgctggaaatgccgttccaaaaacccattactttatgatgccaactattttctttgctggcatactaattgttacgactattgtataccttacaatagtgtaacttcttcaattgtcattacttcaggtgatggcacaacaagtcctatttctgaacatgactaccagattggtggttatactgaaaaatgggaatctggagtaaaagactgtgttgtattacacagttacttcacttcagactattaccagctgtactcaactcaattgagtacagacactggtgttgaacatgttaccttcttcatctacaataaaattgttgatgagcctgaagaacatgtccaaattcacacaatcgacggttcatccggagttgttaatccagtaatggaaccaatttatgatgaaccgacgacgactactagcgtgcctttgtaagcacaagctgatgagtacgaactaaatattatattagtttttctgtttggaactttaattttagccatggcagattccaacggtactattaccgttgaagagcttaaaaagctccttgaacaatggaacctagtaataggtttcctattccttacatggatttgtcttctacaatttgcctatgccaacaggaataggtttttgtatataattaagttaattttcctctggctgttatggccagtaactttagcttgttttgtgcttgctgctgtttacagaataaattggatcaccggtggaattgctatcgcaatggcttgtcttgtaggcttgatgtggctcagctacttcattgcttctttcagactgtttgcgcgtacgcgttccatgtggtcattcaatccagaaactaacattcttctcaacgtgccactccatggcactattctgaccagaccgcttctagaaagtgaactcgtaatcggagctgtgatccttcgtggacatcttcgtattgctggacaccatctaggacgctgtgacatcaaggacctgcctaaagaaatcactgttgctacatcacgaacgctttcttattacaaattgggagcttcgcagcgtgtagcaggtgactcaggttttgctgcatacagtcgctacaggattggcaactataaattaaacacagaccattccagtagcagtgacaatattgctttgcttgtacagtaagtgacaacagacgaacatgaaaattattcttttcttggcactgataacactcgctacttgtgagctttatcactaccaagagtgtgttagaggtacaacagtacttttaaaagaaccttgctcttctggaacatacgagggcaattcaccatttcatcctctagctgataacaaatttgcactgacttgctttagcactcaatttgcttttgcttgtcctgacggcgtaaaacacgtctatcagttacgtgccagatcagtttcacctaaactgttcatcagacaagaggaagttcaagaactttactctccaatttttcttattgttgcggcaatagtgtttataacactttgcttcacactcaaaagaaagacagaatgattgaactttcattaattgacttctatttgtgctttttagcctttctgctattccttgttttaattatgcttattatcttttggttctcacttgaactgcaagatcataatgaaacttgtcacgcctaaacgaacaaactaaaatgtctgttaatggaccccaaaatcagcgaaatgcaccccgcattacgtttggtggaccctcagattcaactggcagtaaccagaatggagaacgcagtggggcgcgatcaaaacaacgtcggccccaaggtttacccaataatactgcgtcttggttcaccgctctcactcaacatggcaaggaagaccttaaattccctcgaggacaaggcgttccaattaacaccaatagcagtccagatgaccaaattggctactaccgaagagctaccagacgaattcgtggtggtgacggtaaaatgaaagatctcagtccaagatggtatttctactacctaggaactgggccagaagctggacttccctatggtgctaacaaagacggcatcatatgggttgcaactgagggagccttgaatacaccaaaagatcacattggcacccgcaatcctgctaacaatgctgcaatcgtgctacaacttcctcaaggaacaacattgccaaaaggcttctacgcagaagggagcagaggcggcagtcaagcctcttctcgttcctcatcacgtagtcgcaacagttcaagaaattcaactccaggcagcagtaggggaacttctcctgctagaatggctggcaatggcggtgatgctgctcttgctttgctgctgcttgacagattgaaccagcttgagagcaaaatgtctggtaaaggccaacaacaacaaggccaaactgtcactaagaaatctgctgctgaggcttctaagaagcctcggcaaaaacgtactgccactaaagcatacaatgtaacacaagctttcggcagacgtggtccagaacaaacccaaggaaattttggggaccaggaactaatcagacaaggaactgattacaaacattggccgcaaattgcacaatttgcccccagcgcttcagcgttcttcggaatgtcgcgcattggcatggaagtcacaccttcgggaacgtggttgacctacacaggtgccatcaaattggatgacaaagatccaaatttcaaagatcaagtcattttgctgaataagcatattgacgcatacaaaacattcccaccaacagagcctaaaaaggacaaaaagaagaaggctgatgaaactcaagccttaccgcagagacagaagaaacagcaaactgtgactcttcttcctgctgcagatttggatgatttctccaaacaattgcaacaatccatgagcagtgctgactcaactcaggcctaaactcatgcagaccacacaaggcagatgggctatataaacgttttcgcttttccgtttacgatatatagtctactcttgtgcagaatgaattctcgtaactacatagcacaagtagatgtagttaactttaatctcacatagcaatctttaatcagtgtgtaacattagggaggacttgaaagagccaccacattttcaccgaggccacgcggagtacgatcgagtgtacagtgaacaatgctagggagagctgcctatatggaagagccctaatgtgtaaaattaattttagtagtgctatccccatgtgattttaatagcttcttaggagaatgacaaaaaaaaaaaaaaaaaaaaaaaaaaaaaaaaaaaaggccggcatggtcccagcctcctcgctggcgccggctgggcaacattccgaggggaccgtcccctcggtaatggcgaatgggacaacttgtttattgcagcttataatggttacaaataaagcaatagcatcacaaatttcacaaataaagcatttttttcactgcattctagttgtggtttgtccaaactcatcaatgtatcttatcatgtctggcggccgctgagacgatcggatccgcataggctgaggggacggatcgcttgcctgtaacttacacgcgcctcgtatcttttaatgatggaataatttgggaatttactctgtgtttatttatttttatgttttgtatttggattttagaaagtaaataaagaaggtagaagagttacggaatgaagaaaaaaaaataaacaaaggtttaaaaaatttcaacaaaaagcgtactttacatatatatttattagacaagaaaagcagattaaatagatatacattcgattaacgataagtaaaatgtaaaatcacaggattttcgtgtgtggtcttctacacagacaagatgaaacaattcggcattaatacctgagagcaggaagagcaagataaaaggtagtatttgttggcgatccccctagagtcttttacatcttcggaaaacaaaaactattttttctttaatttctttttttactttctatttttaatttatatatttatattaaaaaatttaaattataattatttttatagcacgtgatgaaaaggaccctctccccgcgcgttggccgattcattaatgcagctggcacgacaggtttcccgactggaaagcgggcagtgagcgcaacgcaattaatgtgagttagctcactcattaggcaccccaggctttacactttatgcttccggctcgtatgttgtgtggaattgtgagcggataacaatttcacacaggaaacagctttaagccagccccgacacccgccaacacccgctgacgcgccctgacgggcttgtctgctcccggcatccgcttacagacaagctgtgaccgtctccgggagctgcatgtgtcagaggttttcaccgtcatcaccgaaacgcgcgagacgaaagggcctcgtgatacgcctatttttataggttaatgtcatgataataatggtttcttagacgtcgtatttttttttttttagagaaaatcctccaatatcaaattaggaatcgtagtttcatgattttctgttacacctaactttttgtgtggtgccctcctccttgtcaatattaatgttaaagtgcaattctttttccttatcacgttgagccattagtatcaatttgcttacctgtattcctttactatcctcctttttctccttcttgataaatgtatgtagattgcgtatatagtttcgtctaccctatgaacatattccattttgtaatttcgtgtcgtttctattatgaatttcatttataaagtttatgtacaaatatcataaaaaaagagaatctttttaagcaaggattttcttaacttcttcggcgacagcatcaccgacttcggtggtactgttggaaccacctaaatcaccagttctgatacctgcatccaaaacctttttaactgcatcttcaatggccttaccttcttcaggcaagttcaatgacaatttcaacatcattgcagcagacaagatagtggcgatagggtcaaccttattctttggcaaatctggagcagaaccgtgacatggttcgtacaaaccaaatgcggtgttcttgtctggcaaagaggccaaggacgcagatggcaacaaacccaaggaacctgggataacggaggcttcatcggagataatatcaccaaacatgttgctggtgattataataccatttaggtgggttgggttcttaactaggatcatggcggcagaatcaatcaattgatgttgaaccttcaatgtagggaattcgttcttgatggtttcctccacagtttttctccataatcttgaagaggccaaaacattagctttatccaaggaccaaataggcaatggtggctcatgttgtagggccatgaaagcggccattcttgtgattctttgcacttctggaacggtgtattgttcactatcccaagcgacaccatcaccatcgtcttcctttctcttaccaaagtaaatacctcccactaattctctgacaacaacgaagtcagtacctttagcaaattgtggcttgattggagataagtctaaaagagagtcggatgcaaagttacatggtcttaagttggcgtacaattgaagttctttacggatttttagtaaaccttgttcaggtctaacactaccggtaccccatttaggaccacccacagcacctaacaaaacggcatcaaccttcttggaggcttccagcgcctcatctggaagtgggacacctgtagcatcgatagcagcaccaccaattaaatgattttcgaaatcgaacttgacattggaacgaacatcagaaatagctttaagaaccttaatggcttcggctgtgatttcttgaccaacgtggtctcctggcaaaacgacgatcttcttaggggcagacataggggcagacattagaatggtatatccttgaaatatatatatatattgctgaaatgtaaaaggtaagaaaagttagaaagtaagacgattgctaaccacctattggaaaaaacaataggtccttaaataatattgtcaacttcaagtattgtgatgcaagcatttagtcatgaacgcttctctattctatatgaaaagccggttccggcctctcacctttcctttttctcccaatttttcagttgaaaaaggtatatgcgtcaggcgacctctgaaattaacaaaaaatttccagtcatcgaatttgattctgtgcgatagcgcccctgtgtgttctcgttatgttgaggaaaaaaatagcatgcaagcttggcgtaatcatggtcatagctgtttcctgtgtgaaattgttatccgctcacaattccacacaacatacgagccggaagcataaagtgtaaagcctggggtgcctaatgagtgagctaactcacattaattgcgttgcgctcact

SEQ ID NO: 12 - DNA, 13455 bp, synthetic construct
  misc_feature 1..13455: note = Vector without ORF7a
  source 1..13455: mol_type = other DNA
gcccgctttccagtcgggaaacctgtcgtgccagctgcattaatgaatcggccaacgcgcggggagaggcggtttgcgtattgggcgctcttccgcttcctcgctcactgactcgctgcgctcggtcgttcggctgcggcgagcggtatcagctcactcaaaggcggtaatacggttatccacagaatcaggggataacgcaggaaagaacatgtgagcaaaaggccagcaaaaggccaggaaccgtaaaaaggccgcgttgctggcgtttttccataggctccgcccccctgacgagcatcacaaaaatcgacgctcaagtcagaggtggcgaaacccgacaggactataaagataccaggcgtttccccctggaagctccctcgtgcgctctcctgttccgaccctgccgcttaccggatacctgtccgcctttctcccttcgggaagcgtggcgctttctcatagctcacgctgtaggtatctcagttcggtgtaggtcgttcgctccaagctgggctgtgtgcacgaaccccccgttcagcccgaccgctgcgccttatccggtaactatcgtcttgagtccaacccggtaagacacgacttatcgccactggcagcagccactggtaacaggattagcagagcgaggtatgtaggcggtgctacagagttcttgaagtggtggcctaactacggctacactagaagaacagtatttggtatctgcgctctgctgaagccagttaccttcggaaaaagagttggtagctcttgatccggcaaacaaaccaccgctggtagcggtggtttttttgtttgcaagcagcagattacgcgcagaaaaaaaggatctcaagaagatcctttgatcttttctacggggtctgacgctcagtggaacgaaaactcacgttaagggattttggtcatgagattatcaaaaaggatcttcacctagatccttttaaattaaaaatgaagttttaaatcaatctaaagtatatatgagtaaacttggtctgacagttaccaatgcttaatcagtgaggcacctatctcagcgatctgtctatttcgttcatccatagttgcctgactccccgtcgtgtagataactacgatacgggagggcttaccatctggccccagtgctgcaatgataccgcgagacccacgctcaccggctccagatttatcagcaataaaccagccagccggaagggccgagcgcagaagtggtcctgcaactttatccgcctccatccagtctattaattgttgccgggaagctagagtaagtagttcgccagttaatagtttgcgcaacgttgttgccattgctacaggcatcgtggtgtcacgctcgtcgtttggtatggcttcattcagctccggttcccaacgatcaaggcgagttacatgatcccccatgttgtgcaaaaaagcggttagctccttcggtcctccgatcgttgtcagaagtaagttggccgcagtgttatcactcatggttatggcagcactgcataattctcttactgtcatgccatccgtaagatgcttttctgtgactggtgagtactcaaccaagtcattctgagaatagtgtatgcggcgaccgagttgctcttgcccggcgtcaatacgggataataccgcgccacatagcagaactttaaaagtgctcatcattggaaaacgttcttcggggcgaaaactctcaaggatcttaccgctgttgagatccagttcgatgtaacccactcgtgcacccaactgatcttcagcatcttttactttcaccagcgtttctgggtgagcaaaaacaggaaggcaaaatgccgcaaaaaagggaataagggcgacacggaaatgttgaatactcatactcttcctttttcaatattattgaagcatttatcagggttattgtctcatgagcggatacatatttgaatgtatttagaaaaataaacaaataggggttccgcgcacatttccccgaaaagtgccacctgacgtctaagaaaccattattatcatgacattaacctataaaaataggcgtatcacgaggccctttcgtctcgcgcgtttcggtgatgacggtgaaaacctctgacacatgcagctcccggagacggtcacagcttgtctgtaagcggatgccgggagcagacaagcccgtcagggcgcgtcagcgggtgttggcgggtgtcggggctggcttaactatgcggcatcagagcagattgtactgagagtgcaccatatgcggtgtgaaataccgcacagatgcgtaaggagaaaataccgcatcaggcgccattcgccattcaggctgcgcaactgttgggaagggcgatcggtgcgggcctcttcgctattacgccagctggcgaaagggggatgtgctgcaaggcgattaagttgggtaacgccagggttttcccagtcacgacgttgtaaaacgacggccagtgaattcgagctcggtacctcgcgaatgcatctagatcgtctctcagatcttaatgactttgtctctgatgcagattcaactttgattggtgattgtgcaactgtacatacagctaataaatgggatctcattattagtgatatgtacgaccctaagactaaaaatgttacaaaagaaaatgactctaaagagggttttttcacttacatttgtgggtttatacaacaaaagctagctcttggaggttccgtggctataaagataacagaacattcttggaatgctgatctttataagctcatgggacacttcgcatggtggacagcctttgttactaatgtgaatgcgtcatcatctgaagcatttttaattggatgtaattatcttggcaaaccacgcgaacaaatagatggttatgtcatgcatgcaaattacatattttggaggaatacaaatccaattcagttgtcttcctattctttatttgacatgagtaaatttccccttaaattaaggggtactgctgttatgtctttaaaagaaggtcaaatcaatgatatgattttatctcttcttagtaaaggtagacttataattagagaaaacaacagagttgttatttctagtgatgttcttgttaacaactaaacgaacaatgtttgtttttcttgttttattgccactagtctctagtcagtgtgttaatcttacaaccagaactcaattaccccctgcatacactaattctttcacacgtggtgtttattaccctgacaaagttttcagatcctcagttttacattcaactcaggacttgttcttacctttcttttccaatgttacttggttccatgctatatctgggaccaatggtactaagaggtttgataaccctgtcctaccatttaatgatggtgtttattttgcttccactgagaagtctaacataataagaggctggatttttggtactactttagattcgaagacccagtccctacttattgttaataacgctactaatgttgttattaaagtctgtgaatttcaattttgtaatgatccatttttgggtgtttattaccacaaaaacaacaaaagttggatggaaagtgagttcagagtttattctagtgcgaataattgcacttttgaatatgtctctcagccttttcttatggaccttgaaggaaaacagggtaatttcaaaaatcttagggaatttgtgtttaagaatattgatggttattttaaaatatattctaagcacacgcctattaatttagtgcgtgatctccctcagggtttttcggctttagaaccattggtagatttgccaataggtattaacatcactaggtttcaaactttacttgctttacatagaagttatttgactcctggtgattcttcttcaggttggacagctggtgctgcagcttattatgtgggttatcttcaacctaggacttttctattaaaatataatgaaaatggaaccattacagatgctgtagactgtgcacttgaccctctctcagaaacaaagtgtacgttgaaatccttcactgtagaaaaaggaatctatcaaacttctaactttagagtccaaccaacagaatctattgttagatttcctaatattacaaacttgtgcccttttggtgaagtttttaacgccaccagatttgcatctgtttatgcttggaacaggaagagaatcagcaactgtgttgctgattattctgtcctatataattccgcatcattttccacttttaagtgttatggagtgtctcctactaaattaaatgatctctgctttactaatgtctatgcagattcatttgtaattagaggtgatgaagtcagacaaatcgctccagggcaaactggaaagattgctgattataattataaattaccagatgattttacaggctgcgttatagcttggaattctaacaatcttgattctaaggttggtggtaattataattacctgtatagattgtttaggaagtctaatctcaaaccttttgagagagatatttcaactgaaatctatcaggccggtagcacaccttgtaatggtgttaaaggttttaattgttactttcctttacaatcatatggtttccaacccacttatggtgttggttaccaaccatacagagtagtagtactttcttttgaacttctacatgcaccagcaactgtttgtggacctaaaaagtctactaatttggttaaaaacaaatgtgtcaatttcaacttcaatggtttaacaggcacaggtgttcttactgagtctaacaaaaagtttctgcctttccaacaatttggcagcgacattgctgacactactgatgctgtccgtgatccacagacacttgagattcttgacattacaccatgttcttttggtggtgtcagtgttataacaccaggaacaaatacttctaaccaggttgctgttctttatcagggtgttaactgcacagaagtccctgttgctattcatgcagatcaacttactcctacttggcgtgtttattctacaggttctaatgtttttcaaacacgtgcaggctgtttaataggggctgaacatgtcaacaactcatatgagtgtgacatacccattggtgcaggtatatgcgctagttatcagactcagactaattctcctcggcgggcacgtagtgtagctagtcaatccatcattgcctacactatgtcacttggtgcagaaaattcagttgcttactctaataactctattgccatacccacaaattttactattagtgttaccacagaaattctaccagtgtctatgaccaagacatcagtagattgtacaatgtacatttgtggtgattcaactgaatgcagcaatcttttgttgcaatatggcagtttttgtacacaattaaaccgtgctttaactggaatagctgttgaacaagacaaaaacacccaagaagtttttgcacaagtcaaacaaatttacaaaacaccaccaattaaagattttggtggttttaatttttcacaaatattaccagatccatcaaaaccaagcaagaggtcatttattgaagatctacttttcaacaaagtgacacttgcagatgctggcttcatcaaacaatatggtgattgccttggtgatattgctgctagagacctcatttgtgcacaaaagtttaacggccttactgttttgccacctttgctcacagatgaaatgattgctcaatacacttctgcactgttagcgggtacaatcacttctggttggacctttggtgcaggtgctgcattacaaataccatttgctatgcaaatggcttataggtttaatggtattggagttacacagaatgttctctatgagaaccaaaaattgattgccaaccaatttaatagtgctattggcaaaattcaagactcactttcttccacagcaagtgcacttggaaaacttcaagatgtggtcaaccaaaatgcacaagctttaaacacgcttgttaaacaacttagctccaattttggtgcaatttcaagtgttttaaatgatatcctttcacgtcttgacaaagttgaggctgaagtgcaaattgataggttgatcacaggcagacttcaaagtttgcagacatatgtgactcaacaattaattagagctgcagaaatcagagcttctgctaatcttgctgctactaaaatgtcagagtgtgtacttggacaatcaaaaagagttgatttttgtggaaagggctatcatcttatgtccttccctcagtcagcacctcatggtgtagtcttcttgcatgtgacttatgtccctgcacaagaaaagaacttcacaactgctcctgccatttgtcatgatggaaaagcacactttcctcgtgaaggtgtctttgtttcaaatggcacacactggtttgtaacacaaaggaatttttatgaaccacaaatcattactacagacaacacatttgtgtctggtaactgtgatgttgtaataggaattgtcaacaacacagtttatgatcctttgcaacctgaattagactcattcaaggaggagttagataaatattttaagaatcatacatcaccagatgttgatttaggtgacatctctggcattaatgcttcagttgtaaacattcaaaaagaaattgaccgcctcaatgaggttgccaagaatttaaatgaatctctcatcgatctccaagaacttggaaagtatgagcagtatataaaatggccatggtacatttggctaggttttatagctggcttgattgccatagtaatggtgacaattatgctttgctgtatgaccagttgctgtagttgtctcaagggctgttgttcttgtggatcctgctgcaaatttgatgaagacgactctgagccagtgctcaaaggagtcaaattacattacacataaacgaacttatggatttgtttatgagaatcttcacaattggaactgtaactttgaagcaaggtgaaatcaaggatgctactccttcagattttgttcgcgctactgcaacgataccgatacaagcctcactccctttcggatggcttattgttggcgttgcacttcttgctgtttttcagagcgcttccaaaatcataaccctcaaaaagagatggcaactagcactctccaagggtgttcactttgtttgcaacttgctgttgttgtttgtaacagtttactcacaccttttgctcgttgctgctggccttgaagccccttttctctatctttatgctttagtctacttcttgcagagtataaactttgtaagaataataatgaggctttggctttgctggaaatgccgttccaaaaacccattactttatgatgccaactattttctttgctggcatactaattgttacgactattgtataccttacaatagtgtaacttcttcaattgtcattacttcaggtgatggcacaacaagtcctatttctgaacatgactaccagattggtggttatactgaaaaatgggaatctggagtaaaagactgtgttgtattacacagttacttcacttcagactattaccagctgtactcaactcaattgagtacagacactggtgttgaacatgttaccttcttcatctacaataaaattgttgatgagcctgaagaacatgtccaaattcacacaatcgacggttcatccggagttgttaatccagtaatggaaccaatttatgatgaaccgacgacgactactagcgtgcctttgtaagcacaagctgatgagtacgaactaaatattatattagtttttctgtttggaactttaattttagccatggcagattccaacggtactattaccgttgaagagcttaaaaagctccttgaacaatggaacctagtaataggtttcctattccttacatggatttgtcttctacaatttgcctatgccaacaggaataggtttttgtatataattaagttaattttcctctggctgttatggccagtaactttagcttgttttgtgcttgctgctgtttacagaataaattggatcaccggtggaattgctatcgcaatggcttgtcttgtaggcttgatgtggctcagctacttcattgcttctttcagactgtttgcgcgtacgcgttccatgtggtcattcaatccagaaactaacattcttctcaacgtgccactccatggcactattctgaccagaccgcttctagaaagtgaactcgtaatcggagctgtgatccttcgtggacatcttcgtattgctggacaccatctaggacgctgtgacatcaaggacctgcctaaagaaatcactgttgctacatcacgaacgctttcttattacaaattgggagcttcgcagcgtgtagcaggtgactcaggttttgctgcatacagtcgctacaggattggcaactataaattaaacacagaccattccagtagcagtgacaatattgctttgcttgtacagtaagtgacaacagacgaacatgattgaactttcattaattgacttctatttgtgctttttagcctttctgctattccttgttttaattatgcttattatcttttggttctcacttgaactgcaagatcataatgaaacttgtcacgcctaaacgaacaaactaaaatgtctgttaatggaccccaaaatcagcgaaatgcaccccgcattacgtttggtggaccctcagattcaactggcagtaaccagaatggagaacgcagtggggcgcgatcaaaacaacgtcggccccaaggtttacccaataatactgcgtcttggttcaccgctctcactcaacatggcaaggaagaccttaaattccctcgaggacaaggcgttccaattaacaccaatagcagtccagatgaccaaattggctactaccgaagagctaccagacgaattcgtggtggtgacggtaaaatgaaagatctcagtccaagatggtatttctactacctaggaactgggccagaagctggacttccctatggtgctaacaaagacggcatcatatgggttgcaactgagggagccttgaatacaccaaaagatcacattggcacccgcaatcctgctaacaatgctgcaatcgtgctacaacttcctcaaggaacaacattgccaaaaggcttctacgcagaagggagcagaggcggcagtcaagcctcttctcgttcctcatcacgtagtcgcaacagttcaagaaattcaactccaggcagcagtaggggaacttctcctgctagaatggctggcaatggcggtgatgctgctcttgctttgctgctgcttgacagattgaaccagcttgagagcaaaatgtctggtaaaggccaacaacaacaaggccaaactgtcactaagaaatctgctgctgaggcttctaagaagcctcggcaaaaacgtactgccactaaagcatacaatgtaacacaagctttcggcagacgtggtccagaacaaacccaaggaaattttggggaccaggaactaatcagacaaggaactgattacaaacattggccgcaaattgcacaatttgcccccagcgcttcagcgttcttcggaatgtcgcgcattggcatggaagtcacaccttcgggaacgtggttgacctacacaggtgccatcaaattggatgacaaagatccaaatttcaaagatcaagtcattttgctgaataagcatattgacgcatacaaaacattcccaccaacagagcctaaaaaggacaaaaagaagaaggctgatgaaactcaagccttaccgcagagacagaagaaacagcaaactgtgactcttcttcctgctgcagatttggatgatttctccaaacaattgcaacaatccatgagcagtgctgactcaactcaggcctaaactcatgcagaccacacaaggcagatgggctatataaacgttttcgcttttccgtttacgatatatagtctactcttgtgcagaatgaattctcgtaactacatagcacaagtagatgtagttaactttaatctcacatagcaatctttaatcagtgtgtaacattagggaggacttgaaagagccaccacattttcaccgaggccacgcggagtacgatcgagtgtacagtgaacaatgctagggagagctgcctatatggaagagccctaatgtgtaaaattaattttagtagtgctatccccatgtgattttaatagcttcttaggagaatgacaaaaaaaaaaaaaaaaaaaaaaaaaaaaaaaaaaaaggccggcatggtcccagcctcctcgctggcgccggctgggcaacattccgaggggaccgtcccctcggtaatggcgaatgggacaacttgtttattgcagcttataatggttacaaataaagcaatagcatcacaaatttcacaaataaagcatttttttcactgcattctagttgtggtttgtccaaactcatcaatgtatcttatcatgtctggcggccgctgagacgatcggatccgcataggctgaggggacggatcgcttgcctgtaacttacacgcgcctcgtatcttttaatgatggaataatttgggaatttactctgtgtttatttatttttatgttttgtatttggattttagaaagtaaataaagaaggtagaagagttacggaatgaagaaaaaaaaataaacaaaggtttaaaaaatttcaacaaaaagcgtactttacatatatatttattagacaagaaaagcagattaaatagatatacattcgattaacgataagtaaaatgtaaaatcacaggattttcgtgtgtggtcttctacacagacaagatgaaacaattcggcattaatacctgagagcaggaagagcaagataaaaggtagtatttgttggcgatccccctagagtcttttacatcttcggaaaacaaaaactattttttctttaatttctttttttactttctatttttaatttatatatttatattaaaaaatttaaattataattatttttatagcacgtgatgaaaaggaccctctccccgcgcgttggccgattcattaatgcagctggcacgacaggtttcccgactggaaagcgggcagtgagcgcaacgcaattaatgtgagttagctcactcattaggcaccccaggctttacactttatgcttccggctcgtatgttgtgtggaattgtgagcggataacaatttcacacaggaaacagctttaagccagccccgacacccgccaacacccgctgacgcgccctgacgggcttgtctgctcccggcatccgcttacagacaagctgtgaccgtctccgggagctgcatgtgtcagaggttttcaccgtcatcaccgaaacgcgcgagacgaaagggcctcgtgatacgcctatttttataggttaatgtcatgataataatggtttcttagacgtcgtatttttttttttttagagaaaatcctccaatatcaaattaggaatcgtagtttcatgattttctgttacacctaactttttgtgtggtgccctcctccttgtcaatattaatgttaaagtgcaattctttttccttatcacgttgagccattagtatcaatttgcttacctgtattcctttactatcctcctttttctccttcttgataaatgtatgtagattgcgtatatagtttcgtctaccctatgaacatattccattttgtaatttcgtgtcgtttctattatgaatttcatttataaagtttatgtacaaatatcataaaaaaagagaatctttttaagcaaggattttcttaacttcttcggcgacagcatcaccgacttcggtggtactgttggaaccacctaaatcaccagttctgatacctgcatccaaaacctttttaactgcatcttcaatggccttaccttcttcaggcaagttcaatgacaatttcaacatcattgcagcagacaagatagtggcgatagggtcaaccttattctttggcaaatctggagcagaaccgtgacatggttcgtacaaaccaaatgcggtgttcttgtctggcaaagaggccaaggacgcagatggcaacaaacccaaggaacctgggataacggaggcttcatcggagataatatcaccaaacatgttgctggtgattataataccatttaggtgggttgggttcttaactaggatcatggcggcagaatcaatcaattgatgttgaaccttcaatgtagggaattcgttcttgatggtttcctccacagtttttctccataatcttgaagaggccaaaacattagctttatccaaggaccaaataggcaatggtggctcatgttgtagggccatgaaagcggccattcttgtgattctttgcacttctggaacggtgtattgttcactatcccaagcgacaccatcaccatcgtcttcctttctcttaccaaagtaaatacctcccactaattctctgacaacaacgaagtcagtacctttagcaaattgtggcttgattggagataagtctaaaagagagtcggatgcaaagttacatggtcttaagttggcgtacaattgaagttctttacggatttttagtaaaccttgttcaggtctaacactaccggtaccccatttaggaccacccacagcacctaacaaaacggcatcaaccttcttggaggcttccagcgcctcatctggaagtgggacacctgtagcatcgatagcagcaccaccaattaaatgattttcgaaatcgaacttgacattggaacgaacatcagaaatagctttaagaaccttaatggcttcggctgtgatttcttgaccaacgtggtctcctggcaaaacgacgatcttcttaggggcagacataggggcagacattagaatggtatatccttgaaatatatatatatattgctgaaatgtaaaaggtaagaaaagttagaaagtaagacgattgctaaccacctattggaaaaaacaataggtccttaaataatattgtcaacttcaagtattgtgatgcaagcatttagtcatgaacgcttctctattctatatgaaaagccggttccggcctctcacctttcctttttctcccaatttttcagttgaaaaaggtatatgcgtcaggcgacctctgaaattaacaaaaaatttccagtcatcgaatttgattctgtgcgatagcgcccctgtgtgttctcgttatgttgaggaaaaaaatagcatgcaagcttggcgtaatcatggtcatagctgtttcctgtgtgaaattgttatccgctcacaattccacacaacatacgagccggaagcataaagtgtaaagcctggggtgcctaatgagtgagctaactcacattaattgcgttgcgctcact

SEQ ID NO: 13 - DNA, 1260 bp, synthetic construct
  misc_feature 1..1260: note = N Protein
  source 1..1260: mol_type = other DNA; note = virus
atgtctgataatggaccccaaaatcagcgaaatgcaccccgcattacgtttggtggaccctcagattcaactggcagtaaccagaatggagaacgcagtggggcgcgatcaaaacaacgtcggccccaaggtttacccaataatactgcgtcttggttcaccgctctcactcaacatggcaaggaagaccttaaattccctcgaggacaaggcgttccaattaacaccaatagcagtccagatgaccaaattggctactaccgaagagctaccagacgaattcgtggtggtgacggtaaaatgaaagatctcagtccaagatggtatttctactacctaggaactgggccagaagctggacttccctatggtgctaacaaagacggcatcatatgggttgcaactgagggagccttgaatacaccaaaagatcacattggcacccgcaatcctgctaacaatgctgcaatcgtgctacaacttcctcaaggaacaacattgccaaaaggcttctacgcagaagggagcagaggcggcagtcaagcctcttctcgttcctcatcacgtagtcgcaacagttcaagaaattcaactccaggcagcagtaggggaacttctcctgctagaatggctggcaatggcggtgatgctgctcttgctttgctgctgcttgacagattgaaccagcttgagagcaaaatgtctggtaaaggccaacaacaacaaggccaaactgtcactaagaaatctgctgctgaggcttctaagaagcctcggcaaaaacgtactgccactaaagcatacaatgtaacacaagctttcggcagacgtggtccagaacaaacccaaggaaattttggggaccaggaactaatcagacaaggaactgattacaaacattggccgcaaattgcacaatttgcccccagcgcttcagcgttcttcggaatgtcgcgcattggcatggaagtcacaccttcgggaacgtggttgacctacacaggtgccatcaaattggatgacaaagatccaaatttcaaagatcaagtcattttgctgaataagcatattgacgcatacaaaacattcccaccaacagagcctaaaaaggacaaaaagaagaaggctgatgaaactcaagccttaccgcagagacagaagaaacagcaaactgtgactcttcttcctgctgcagatttggatgatttctccaaacaattgcaacaatccatgagcagtgctgactcaactcaggcctaa

SEQ ID NO: 14 - DNA, 3822 bp, synthetic construct
  misc_feature 1..3822: note = S Protein
  source 1..3822: mol_type = other DNA; note = virus
atgtttgtttttcttgttttattgccactagtctctagtcagtgtgttaatcttacaaccagaactcaattaccccctgcatacactaattctttcacacgtggtgtttattaccctgacaaagttttcagatcctcagttttacattcaactcaggacttgttcttacctttcttttccaatgttacttggttccatgctatacatgtctctgggaccaatggtactaagaggtttgataaccctgtcctaccatttaatgatggtgtttattttgcttccactgagaagtctaacataataagaggctggatttttggtactactttagattcgaagacccagtccctacttattgttaataacgctactaatgttgttattaaagtctgtgaatttcaattttgtaatgatccatttttgggtgtttattaccacaaaaacaacaaaagttggatggaaagtgagttcagagtttattctagtgcgaataattgcacttttgaatatgtctctcagccttttcttatggaccttgaaggaaaacagggtaatttcaaaaatcttagggaatttgtgtttaagaatattgatggttattttaaaatatattctaagcacacgcctattaatttagtgcgtgatctccctcagggtttttcggctttagaaccattggtagatttgccaataggtattaacatcactaggtttcaaactttacttgctttacatagaagttatttgactcctggtgattcttcttcaggttggacagctggtgctgcagcttattatgtgggttatcttcaacctaggacttttctattaaaatataatgaaaatggaaccattacagatgctgtagactgtgcacttgaccctctctcagaaacaaagtgtacgttgaaatccttcactgtagaaaaaggaatctatcaaacttctaactttagagtccaaccaacagaatctattgttagatttcctaatattacaaacttgtgcccttttggtgaagtttttaacgccaccagatttgcatctgtttatgcttggaacaggaagagaatcagcaactgtgttgctgattattctgtcctatataattccgcatcattttccacttttaagtgttatggagtgtctcctactaaattaaatgatctctgctttactaatgtctatgcagattcatttgtaattagaggtgatgaagtcagacaaatcgctccagggcaaactggaaagattgctgattataattataaattaccagatgattttacaggctgcgttatagcttggaattctaacaatcttgattctaaggttggtggtaattataattacctgtatagattgtttaggaagtctaatctcaaaccttttgagagagatatttcaactgaaatctatcaggccggtagcacaccttgtaatggtgttgaaggttttaattgttactttcctttacaatcatatggtttccaacccactaatggtgttggttaccaaccatacagagtagtagtactttcttttgaacttctacatgcaccagcaactgtttgtggacctaaaaagtctactaatttggttaaaaacaaatgtgtcaatttcaacttcaatggtttaacaggcacaggtgttcttactgagtctaacaaaaagtttctgcctttccaacaatttggcagagacattgctgacactactgatgctgtccgtgatccacagacacttgagattcttgacattacaccatgttcttttggtggtgtcagtgttataacaccaggaacaaatacttctaaccaggttgctgttctttatcaggatgttaactgcacagaagtccctgttgctattcatgcagatcaacttactcctacttggcgtgtttattctacaggttctaatgtttttcaaacacgtgcaggctgtttaataggggctgaacatgtcaacaactcatatgagtgtgacatacccattggtgcaggtatatgcgctagttatcagactcagactaattctcctcggcgggcacgtagtgtagctagtcaatccatcattgcctacactatgtcacttggtgcagaaaattcagttgcttactctaataactctattgccatacccacaaattttactattagtgttaccacagaaattctaccagtgtctatgaccaagacatcagtagattgtacaatgtacatttgtggtgattcaactgaatgcagcaatcttttgttgcaatatggcagtttttgtacacaattaaaccgtgctttaactggaatagctgttgaacaagacaaaaacacccaagaagtttttgcacaagtcaaacaaatttacaaaacaccaccaattaaagattttggtggttttaatttttcacaaatattaccagatccatcaaaaccaagcaagaggtcatttattgaagatctacttttcaacaaagtgacacttgcagatgctggcttcatcaaacaatatggtgattgccttggtgatattgctgctagagacctcatttgtgcacaaaagtttaacggccttactgttttgccacctttgctcacagatgaaatgattgctcaatacacttctgcactgttagcgggtacaatcacttctggttggacctttggtgcaggtgctgcattacaaataccatttgctatgcaaatggcttataggtttaatggtattggagttacacagaatgttctctatgagaaccaaaaattgattgccaaccaatttaatagtgctattggcaaaattcaagactcactttcttccacagcaagtgcacttggaaaacttcaagatgtggtcaaccaaaatgcacaagctttaaacacgcttgttaaacaacttagctccaattttggtgcaatttcaagtgttttaaatgatatcctttcacgtcttgacaaagttgaggctgaagtgcaaattgataggttgatcacaggcagacttcaaagtttgcagacatatgtgactcaacaattaattagagctgcagaaatcagagcttctgctaatcttgctgctactaaaatgtcagagtgtgtacttggacaatcaaaaagagttgatttttgtggaaagggctatcatcttatgtccttccctcagtcagcacctcatggtgtagtcttcttgcatgtgacttatgtccctgcacaagaaaagaacttcacaactgctcctgccatttgtcatgatggaaaagcacactttcctcgtgaaggtgtctttgtttcaaatggcacacactggtttgtaacacaaaggaatttttatgaaccacaaatcattactacagacaacacatttgtgtctggtaactgtgatgttgtaataggaattgtcaacaacacagtttatgatcctttgcaacctgaattagactcattcaaggaggagttagataaatattttaagaatcatacatcaccagatgttgatttaggtgacatctctggcattaatgcttcagttgtaaacattcaaaaagaaattgaccgcctcaatgaggttgccaagaatttaaatgaatctctcatcgatctccaagaacttggaaagtatgagcagtatataaaatggccatggtacatttggctaggttttatagctggcttgattgccatagtaatggtgacaattatgctttgctgtatgaccagttgctgtagttgtctcaagggctgttgttcttgtggatcctgctgcaaatttgatgaagacgactctgagccagtgctcaaaggagtcaaattacattacacataa

SEQ ID NO: 15 - DNA, 228 bp, synthetic construct
  misc_feature 1..228: note = E Protein
  source 1..228: mol_type = other DNA; note = virus
atgtactcattcgtttcggaagagacaggtacgttaatagttaatagcgtacttctttttcttgctttcgtggtattcttgctagttacactagccatccttactgcgcttcgattgtgtgcgtactgctgcaatattgttaacgtgagtcttgtaaaaccttctttttacgtttactctcgtgttaaaaatctgaattcttctagagttcctgatcttctggtctaa

SEQ ID NO: 16 - DNA, 669 bp, synthetic construct
  misc_feature 1..669: note = M Protein
  source 1..669: mol_type = other DNA; note = virus
atggcagattccaacggtactattaccgttgaagagcttaaaaagctccttgaacaatggaacctagtaataggtttcctattccttacatggatttgtcttctacaatttgcctatgccaacaggaataggtttttgtatataattaagttaattttcctctggctgttatggccagtaactttagcttgttttgtgcttgctgctgtttacagaataaattggatcaccggtggaattgctatcgcaatggcttgtcttgtaggcttgatgtggctcagctacttcattgcttctttcagactgtttgcgcgtacgcgttccatgtggtcattcaatccagaaactaacattcttctcaacgtgccactccatggcactattctgaccagaccgcttctagaaagtgaactcgtaatcggagctgtgatccttcgtggacatcttcgtattgctggacaccatctaggacgctgtgacatcaaggacctgcctaaagaaatcactgttgctacatcacgaacgctttcttattacaaattgggagcttcgcagcgtgtagcaggtgactcaggttttgctgcatacagtcgctacaggattggcaactataaattaaacacagaccattccagtagcagtgacaatattgctttgcttgtacagtaa

SEQ ID NO: 17 - DNA, 828 bp, synthetic construct
  misc_feature 1..828: note = ORF3a
  source 1..828: mol_type = other DNA; note = virus
atggatttgtttatgagaatcttcacaattggaactgtaactttgaagcaaggtgaaatcaaggatgctactccttcagattttgttcgcgctactgcaacgataccgatacaagcctcactccctttcggatggcttattgttggcgttgcacttcttgctgtttttcagagcgcttccaaaatcataaccctcaaaaagagatggcaactagcactctccaagggtgttcactttgtttgcaacttgctgttgttgtttgtaacagtttactcacaccttttgctcgttgctgctggccttgaagccccttttctctatctttatgctttagtctacttcttgcagagtataaactttgtaagaataataatgaggctttggctttgctggaaatgccgttccaaaaacccattactttatgatgccaactattttctttgctggcatactaattgttacgactattgtataccttacaatagtgtaacttcttcaattgtcattacttcaggtgatggcacaacaagtcctatttctgaacatgactaccagattggtggttatactgaaaaatgggaatctggagtaaaagactgtgttgtattacacagttacttcacttcagactattaccagctgtactcaactcaattgagtacagacactggtgttgaacatgttaccttcttcatctacaataaaattgttgatgagcctgaagaacatgtccaaattcacacaatcgacggttcatccggagttgttaatccagtaatggaaccaatttatgatgaaccgacgacgactactagcgtgcctttgtaa

SEQ ID NO: 18 - DNA, 186 bp, synthetic construct
  misc_feature 1..186: note = ORF6
  source 1..186: mol_type = other DNA; note = virus
atgtttcatctcgttgactttcaggttactatagcagagatattactaattattatgaggacttttaaagtttccatttggaatcttgattacatcataaacctcataattaaaaatttatctaagtcactaactgagaataaatattctcaattagatgaagagcaaccaatggagattgattaa

SEQ ID NO: 19 - DNA, 366 bp, synthetic construct
  misc_feature 1..366: note = ORF7a
  source 1..366: mol_type = other DNA; note = virus
atgaaaattattcttttcttggcactgataacactcgctacttgtgagctttatcactaccaagagtgtgttagaggtacaacagtacttttaaaagaaccttgctcttctggaacatacgagggcaattcaccatttcatcctctagctgataacaaatttgcactgacttgctttagcactcaatttgcttttgcttgtcctgacggcgtaaaacacgtctatcagttacgtgccagatcagtttcacctaaactgttcatcagacaagaggaagttcaagaactttactctccaatttttcttattgttgcggcaatagtgtttataacactttgcttcacactcaaaagaaagacagaatga

SEQ ID NO: 20 - DNA, 132 bp, synthetic construct
  misc_feature 1..132: note = ORF7b
  source 1..132: mol_type = other DNA; note = virus
atgattgaactttcattaattgacttctatttgtgctttttagcctttctgctattccttgttttaattatgcttattatcttttggttctcacttgaactgcaagatcataatgaaacttgtcacgcctaa

SEQ ID NO: 21 - DNA, 366 bp, synthetic construct
  misc_feature 1..366: note = ORF8
  source 1..366: mol_type = other DNA; note = virus
atgaaatttcttgttttcttaggaatcatcacaactgtagctgcatttcaccaagaatgtagtttacagtcatgtactcaacatcaaccatatgtagttgatgacccgtgtcctattcacttctattctaaatggtatattagagtaggagctagaaaatcagcacctttaattgaattgtgcgtggatgaggctggttctaaatcacccattcagtacatcgatatcggtaattatacagtttcctgtttaccttttacaattaattgccaggaacctaaattgggtagtcttgtagtgcgttgttcgttctatgaagactttttagagtatcatgacgttcgtgttgttttagatttcatctaa

SEQ ID NO: 22 - DNA, 14709 bp, synthetic construct
  misc_feature 1..14709: note = Fragment A
  source 1..14709: mol_type = other DNA
gcccgctttccagtcgggaaacctgtcgtgccagctgcattaatgaatcggccaacgcgcggggagaggcggtttgcgtattgggcgctcttccgcttcctcgctcactgactcgctgcgctcggtcgttcggctgcggcgagcggtatcagctcactcaaaggcggtaatacggttatccacagaatcaggggataacgcaggaaagaacatgtgagcaaaaggccagcaaaaggccaggaaccgtaaaaaggccgcgttgctggcgtttttccataggctccgcccccctgacgagcatcacaaaaatcgacgctcaagtcagaggtggcgaaacccgacaggactataaagataccaggcgtttccccctggaagctccctcgtgcgctctcctgttccgaccctgccgcttaccggatacctgtccgcctttctcccttcgggaagcgtggcgctttctcatagctcacgctgtaggtatctcagttcggtgtaggtcgttcgctccaagctgggctgtgtgcacgaaccccccgttcagcccgaccgctgcgccttatccggtaactatcgtcttgagtccaacccggtaagacacgacttatcgccactggcagcagccactggtaacaggattagcagagcgaggtatgtaggcggtgctacagagttcttgaagtggtggcctaactacggctacactagaagaacagtatttggtatctgcgctctgctgaagccagttaccttcggaaaaagagttggtagctcttgatccggcaaacaaaccaccgctggtagcggtggtttttttgtttgcaagcagcagattacgcgcagaaaaaaaggatctcaagaagatcctttgatcttttctacggggtctgacgctcagtggaacgaaaactcacgttaagggattttggtcatgagattatcaaaaaggatcttcacctagatccttttaaattaaaaatgaagttttaaatcaatctaaagtatatatgagtaaacttggtctgacagttaccaatgcttaatcagtgaggcacctatctcagcgatctgtctatttcgttcatccatagttgcctgactccccgtcgtgtagataactacgatacgggagggcttaccatctggccccagtgctgcaatgataccgcgagacccacgctcaccggctccagatttatcagcaataaaccagccagccggaagggccgagcgcagaagtggtcctgcaactttatccgcctccatccagtctattaattgttgccgggaagctagagtaagtagttcgccagttaatagtttgcgcaacgttgttgccattgctacaggcatcgtggtgtcacgctcgtcgtttggtatggcttcattcagctccggttcccaacgatcaaggcgagttacatgatcccccatgttgtgcaaaaaagcggttagctccttcggtcctccgatcgttgtcagaagtaagttggccgcagtgttatcactcatggttatggcagcactgcataattctcttactgtcatgccatccgtaagatgcttttctgtgactggtgagtactcaaccaagtcattctgagaatagtgtatgcggcgaccgagttgctcttgcccggcgtcaatacgggataataccgcgccacatagcagaactttaaaagtgctcatcattggaaaacgttcttcggggcgaaaactctcaaggatcttaccgctgttgagatccagttcgatgtaacccactcgtgcacccaactgatcttcagcatcttttactttcaccagcgtttctgggtgagcaaaaacaggaaggcaaaatgccgcaaaaaagggaataagggcgacacggaaatgttgaatactcatactcttcctttttcaatattattgaagcatttatcagggttattgtctcatgagcggatacatatttgaatgtatttagaaaaataaacaaataggggttccgcgcacatttccccgaaaagtgccacctgacgtctaagaaaccattattatcatgacattaacctataaaaataggcgtatcacgaggccctttcgtctcgcgcgtttcggtgatgacggtgaaaacctctgacacatgcagctcccggagacggtcacagcttgtctgtaagcggatgccgggagcagacaagcccgtcagggcgcgtcagcgggtgttggcgggtgtcggggctggcttaactatgcggcatcagagcagattgtactgagagtgcaccatatgcggtgtgaaataccgcacagatgcgtaaggagaaaataccgcatcaggcgccattcgccattcaggctgcgcaactgttgggaagggcgatcggtgcgggcctcttcgctattacgccagctggcgaaagggggatgtgctgcaaggcgattaagttgggtaacgccagggttttcccagtcacgacgttgtaaaacgacggccagtgaattcgagctcggtacctcgcgaatgcatctagatggtctccctaacgatgtacgggccagatatacgcgttgacattgattattgactagttattaatagtaatcaattacggggtcattagttcatagcccatatatggagttccgcgttacataacttacggtaaatggcccgcctggctgaccgcccaacgacccccgcccattgacgtcaataatgacgtatgttcccatagtaacgccaatagggactttccattgacgtcaatgggtggagtatttacggtaaactgcccacttggcagtacatcaagtgtatcatatgccaagtacgccccctattgacgtcaatgacggtaaatggcccgcctggcattatgcccagtacatgaccttatgggactttcctacttggcagtacatctacgtattagtcatcgctattaccatggtgatgcggttttggcagtacatcaatgggcgtggatagcggtttgactcacggggatttccaagtctccaccccattgacgtcaatgggagtttgttttggcaccaaaatcaacgggactttccaaaatgtcgtaacaactccgccccattgacgcaaatgggcggtaggcgtgtacggtgggaggtctatataagcagagctctctggctaactagagaacccactgcttactggcttatcgaaattaatacgactcactatagggattaaaggtttataccttcccaggtaacaaaccaaccaactttcgatctcttgtagatctgttctctaaacgaactttaaaatctgtgtggctgtcactcggctgcatgcttagtgcactcacgcagtataattaataactaattactgtcgttgacaggacacgagtaactcgtctatcttctgcaggctgcttacggtttcgtccgtgttgcagccgatcatcagcacatctaggttttgtccgggtgtgaccgaaaggtaagatggagagccttgtccctggtttcaacgagaaaacacacgtccaactcagtttgcctgttttacaggttcgcgacgtgctcgtacgtggctttggagactccgtggaggaggtcttatcagaggcacgtcaacatcttaaagatggcacttgtggcttagtagaagttgaaaaaggcgttttgcctcaacttgaacagccctatgtgttcatcaaacgttcggatgctcgaactgcacctcatggtcatgttatggttgagctggtagcagaactcgaaggcattcagtacggtcgtagtggtgagacacttggtgtccttgtccctcatgtgggcgaaataccagtggcttaccgcaaggttcttcttcgtaagaacggtaataaaggagctggtggccatagttacggcgccgatctaaagtcatttgacttaggcgacgagcttggcactgatccttatgaagattttcaagaaaactggaacactaaacatagcagtggtgttacccgtgaactcatgcgtgagcttaacggaggggcatacactcgctatgtcgataacaacttctgtggccctgatggctaccctcttgagtgcattaaagaccttctagcacgtgctggtaaagcttcatgcactttgtccgaacaactggactttattgacactaagaggggtgtatactgctgccgtgaacatgagcatgaaattgcttggtacacggaacgttctgaaaagagctatgaattgcagacaccttttgaaattaaattggcaaagaaatttgacaccttcaatggggaatgtccaaattttgtatttcccttaaattccataatcaagactattcaaccaagggttgaaaagaaaaagcttgatggctttatgggtagaattcgatctgtctatccagttgcgtcaccaaatgaatgcaaccaaatgtgcctttcaactctcatgaagtgtgatcattgtggtgaaacttcatggcagacgggcgattttgttaaagccacttgcgaattttgtggcactgagaatttgactaaagaaggtgccactacttgtggttacttaccccaaaatgctgttgttaaaatttattgtccagcatgtcacaattcagaagtaggacctgagcatagtcttgccgaataccataatgaatctggcttgaaaaccattcttcgtaagggtggtcgcactattgcctttggaggctgtgtgttctcttatgttggttgccataacaagtgtgcctattgggttccacgtgctagcgctaacataggttgtaaccatacaggtgttgttggagaaggttccgaaggtcttaatgacaaccttcttgaaatactccaaaaagagaaagtcaacatcaatattgttggtgactttaaacttaatgaagagatcgccattattttggcatctttttctgcttccacaagtgcttttgtggaaactgtgaaaggtttggattataaagcattcaaacaaattgttgaatcctgtggtaattttaaagttacaaaaggaaaagctaaaaaaggtgcctggaatattggtgaacagaaatcaatactgagtcctctttatgcatttgcatcagaggctgctcgtgttgtacgatcaattttctcccgcactcttgaaactgctcaaaattctgtgcgtgttttacagaaggccgctataacaatactagatggaatttcacagtattcactgagactcattgatgctatgatgttcacatctgatttggctactaacaatctagttgtaatggcctacattacaggtggtgttgttcagttgacttcgcagtggctaactaacatctttggcactgtttatgaaaaactcaaacccgtccttgattggcttgaagagaagtttaaggaaggtgtagagtttcttagagacggttgggaaattgttaaatttatctcaacctgtgcttgtgaaattgtcggtggacaaattgtcacctgtgcaaaggaaattaaggagagtgttcagacattctttaagcttgtaaataaatttttggctttgtgtgctgactctatcattattggtggagctaaacttaaagccttgaatttaggtgaaacatttgtcacgcactcaaagggattgtacagaaagtgtgttaaatccagagaagaaactggcctactcatgcctctaaaagccccaaaagaaattatcttcttagagggagaaacacttcccacagaagtgttaacagaggaagttgtcttgaaaactggtgatttacaaccattagaacaacctactagtgaagctgttgaagctccattggttggtacaccagtttgtattaacgggcttatgttgctcgaaatcaaagacacagaaaagtactgtgcccttgcacctaatatgatggtaacaaacaataccttcacactcaaaggcggtgcaccaacaaaggttacttttggtgatgacactgtgatagaagtgcaaggttacaagagtgtgaatatcacttttgaacttgatgaaaggattgataaagtacttaatgagaagtgctctgcctatacagttgaactcggtacagaagtaaatgagttcgcctgtgttgtggcagatgctgtcataaaaactttgcaaccagtatctgaattacttacaccactgggcattgatttagatgagtggagtatggctacatactacttatttgatgagtctggtgagtttaaattggcttcacatatgtattgttctttttaccctccagatgaggatgaagaagaaggtgattgtgaagaagaagagtttgagccatcaactcaatatgagtatggtactgaagatgattaccaaggtaaacctttggaatttggtgccacttctgctgctcttcaacctgaagaagagcaagaagaagattggttagatgatgatagtcaacaaactgttggtcaacaagacggcagtgaggacaatcagacaactactattcaaacaattgttgaggttcaacctcaattagagatggaacttacaccagttgttcagactattgaagtgaatagttttagtggttatttaaaacttactgacaatgtatacattaaaaatgcagacattgtggaagaagctaaaaaggtaaaaccaacagtggttgttaatgcagccaatgtttaccttaaacatggaggaggtgttgcaggagccttaaataaggctactaacaatgccatgcaagttgaatctgatgattacatagctactaatggaccacttaaagtgggtggtagttgtgttttaagcggacacaatcttgctaaacactgtcttcatgttgtcggcccaaatgttaacaaaggtgaagacattcaacttcttaagagtgcttatgaaaattttaatcagcacgaagttctacttgcaccattattatcagctggtatttttggtgctgaccctatacattctttaagagtttgtgtagatactgttcgcacaaatgtctacttagctgtctttgataaaaatctctatgacaaacttgtttcaagctttttggaaatgaagagtgaaaagcaagttgaacaaaagatcgctgagattcctaaagaggaagttaagccatttataactgaaagtaaaccttcagttgaacagagaaaacaagatgataagaaaatcaaagcttgtgttgaagaagttacaacaactctggaagaaactaagttcctcacagaaaacttgttactttatattgacattaatggcaatcttcatccagattctgccactcttgttagtgacattgacatcactttcttaaagaaagatgctccatatatagtgggtgatgttgttcaagagggtgttttaactgctgtggttatacctactaaaaaggctggtggcactactgaaatgctagcgaaagctttgagaaaagtgccaacagacaattatataaccacttacccgggtcagggtttaaatggttacactgtagaggaggcaaagacagtgcttaaaaagtgtaaaagtgccttttacattctaccatctattatctctaatgagaagcaagaaattcttggaactgtttcttggaatttgcgagaaatgcttgcacatgcagaagaaacacgcaaattaatgcctgtctgtgtggaaactaaagccatagtttcaactatacagcgtaaatataagggtattaaaatacaagagggtgtggttgattatggtgctagattttacttttacaccagtaaaacaactgtagcgtcacttatcaacacacttaacgatctaaatgaaactcttgttacaatgccacttggctatgtaacacatggcttaaatttggaagaagctgctcggtatatgagatctctcaaagtgccagctacagtttctgtttcttcacctgatgctgttacagcgtataatggttatcttacttcttcttctaaaacacctgaagaacattttattgaaaccatctcacttgctggttcctataaagattggtcctattctggacaatctacacaactaggtatagaatttcttaagagaggtgataaaagtgtatattacactagtaatcctaccacattccacctagatggtgaagttatcacctttgacaatcttaagacacttctttctttgagagaagtgaggactattaaggtgtttacaacagtagacaacattaacctccacacgcaagttgtggacatgtcaatgacatatggacaacagtttggtccaacttatttggatggagctgatgttactaaaataaaacctcataattcacatgaaggtaaaacattttatgttttacctaatgatgacactctacgtgttgaggcttttgagtactaccacacaactgatcctagttttctgggtaggtacatgtcagcattaaatcacactaaaaagtggaaatacccacaagttaatggtttaacttctattaaatgggcagataacaactgttatcttgccactgcattgttaacactccaacaaatagagttgaagtttaatccacctgctctacaagatgcttattacagagcaagggctggtgaagctgctaacttttgtgcacttatcttagcctactgtaataagacagtaggtgagttaggtgatgttagagaaacaatgagttacttgtttcaacatgccaatttagattcttgcaaaagagtcttgaacgtggtgtgtaaaacttgtggacaacagcagacaacccttaagggtgtagaagctgttatgtacatgggcacactttcttatgaacaatttaagaaaggtgttcagataccttgtacgtgtggtaaacaagctacaaaatatctagtacaacaggagtcaccttttgttatgatgtcagcaccacctgctcagtatgaacttaagcatggtacatttacttgtgctagtgagtacactggtaattaccagtgtggtcactataaacatataacttctaaagaaactttgtattgcatagacggtgctttacttacaaagtcctcagaatacaaaggtcctattacggatgttttctacaaagaaaacagttacacaacaaccataaaaccagttacttataaattggatggtgttgtttgtacagaaattgaccctaagttggacaattattataagaaagacaattcttatttcacagagcaaccaattgatcttgtaccaaaccaaccatatccaaacgcaagcttcgataattttaagtttgtatgtgataatatcaaatttgctgatgatttaaaccagttaactggttataagaaacctgcttcaagagagcttaaagttacatttttccctgacttaaatggtgatgtggtggctattgattataaacactacacaccctcttttaagaaaggagctaaattgttacataaacctattgtttggcatgttaacaatgcaactaataaagccacgtataaaccaaatacctggtgtatacgttgtctttggagcacaaaaccagttgaaacatcaaattcgtttgatgtactgaagtcagaggacgcgcagggaatggataatcttgcctgcgaagatctaaaaccagtctctgaagaagtagtggaaaatcctaccatacagaaagacgttcttgagtgtaatgtgaaaactaccgaagttgtaggagacattatacttaaaccagcaaataatagtttaaaaattacagaagaggttggccacacagatctaatggctgcttatgtagacaattctagtcttactattaagaaacctaatgaattatctagagtattaggtttgaaaacccttgctactcatggtttagctgctgttaatagtgtcccttgggatactatagctaattatgctaagccttttcttaacaaagttgttagtacaactactaacatagttacacggtgtttaaaccgtgtttgtactaattatatgccttatttctttactttattgctacaattgtgtacttttactagaagtacaaattctagaattaaagcatctatgccgactactatagcaaagaatactgttaagagtgtcggtaaattttgtctagaggcttcatttaattatttgaagtcacctaatttttctaaactgataaatattataatttggtttttactattaagtgtttgcctaggttctttaatctactcaaccgctgctttaggtgttttaatgtctaatttaggcatgccttcttactgtactggttacagagaaggctatttgaactctactaatgtcactattgcaacctactgtactggttctataccttgtagtgtttgtcttagtggtttagattctttagacacctatccttctttagaaactatacaaattaccatttcatcttttaaatgggatttaactgcttttggcttagttgcagagtggtttttggcatatattcttttcactaggtttttctatgtacttggattggctgcaatcatgcaattgtttttcagctattttgcagtacattttattagtaattcttggcttatgtggttaataattaatcttgtacaaatggccccgatttcagctatggttagaatgtacatcttctttgcatcattttattatgtatggaaaagttatgtgcatgttgtagacggttgtaattcatcaacttgtatgatgtgttacaaacgtaatagagcaacaagagtcgaatgtacaactattgttaatggtgttagaaggtccttttatgtctatgctaatggaggtaaaggcttttgcaaactacacaattggaattgtgttaattgtgatacattctgtgctggtagtacatttattagtgatgaagttgcgagagacttgtcactacagtttaaaagaccaataaatcctactgaccagtcttcttacatcgttgatagtgttacagtgaagaatggttccatccatctttactttgataaagctggtcaaaagacttatgaaagacattctctctctcattttgttaacttagacaacctgagagctaataacactaaaggttcattgcctattaatgttatagtttttgatggtaaatcaaaatgtgaagaatcatctgcaaaatcagcgtctgtttactacagtcagcttatgtgtcaacctatactgttactagatcaggcattagtgtctgatgttggtgatagtgcggaagttgcagttaaaatgtttgatgcttacgttaatacgttttcatcaacttttaacgtaccaatggaaaaactcaaaacactagttgcaactgcagaagctgaacttgcaaagaatgtgtccttagacaatgtcttatctacttttatttcagcagctcggcaagggtttgttgattcagatgtagaaactaaagatgttgttgaatgtcttaaattgtcacatcaatctgacatagaagttactggcgatagttgtaataactatatgctcacctataacaaagttgaaaacatgacaccccgtgaccttggtgcttgtattgactgtagtgcgcgtcatattaatgcgcaggtagcaaaaagtcacaacattgctttgatatggaacgttaaagatttcatgtcattgtctgaacaactacgaaaacaaatacgtagtgctgctaaaaagaataacttaccttttaagttgacatgtgcaactactagacaagttgttaatgttgtaacaacaaagatagcacttaagggtggtaaaattgttaataattggttgaagcagttaattaaagttagagaccatcggatccgcataggctgaggggacggatcgcttgcctgtaacttacacgcgcctcgtatcttttaatgatggaataatttgggaatttactctgtgtttatttatttttatgttttgtatttggattttagaaagtaaataaagaaggtagaagagttacggaatgaagaaaaaaaaataaacaaaggtttaaaaaatttcaacaaaaagcgtactttacatatatatttattagacaagaaaagcagattaaatagatatacattcgattaacgataagtaaaatgtaaaatcacaggattttcgtgtgtggtcttctacacagacaagatgaaacaattcggcattaatacctgagagcaggaagagcaagataaaaggtagtatttgttggcgatccccctagagtcttttacatcttcggaaaacaaaaactattttttctttaatttctttttttactttctatttttaatttatatatttatattaaaaaatttaaattataattatttttatagcacgtgatgaaaaggaccctctccccgcgcgttggccgattcattaatgcagctggcacgacaggtttcccgactggaaagcgggcagtgagcgcaacgcaattaatgtgagttagctcactcattaggcaccccaggctttacactttatgcttccggctcgtatgttgtgtggaattgtgagcggataacaatttcacacaggaaacagctttaagccagccccgacacccgccaacacccgctgacgcgccctgacgggcttgtctgctcccggcatccgcttacagacaagctgtgaccgtctccgggagctgcatgtgtcagaggttttcaccgtcatcaccgaaacgcgcgagacgaaagggcctcgtgatacgcctatttttataggttaatgtcatgataataatggtttcttagacgtcgtatttttttttttttagagaaaatcctccaatatcaaattaggaatcgtagtttcatgattttctgttacacctaactttttgtgtggtgccctcctccttgtcaatattaatgttaaagtgcaattctttttccttatcacgttgagccattagtatcaatttgcttacctgtattcctttactatcctcctttttctccttcttgataaatgtatgtagattgcgtatatagtttcgtctaccctatgaacatattccattttgtaatttcgtgtcgtttctattatgaatttcatttataaagtttatgtacaaatatcataaaaaaagagaatctttttaagcaaggattttcttaacttcttcggcgacagcatcaccgacttcggtggtactgttggaaccacctaaatcaccagttctgatacctgcatccaaaacctttttaactgcatcttcaatggccttaccttcttcaggcaagttcaatgacaatttcaacatcattgcagcagacaagatagtggcgatagggtcaaccttattctttggcaaatctggagcagaaccgtgacatggttcgtacaaaccaaatgcggtgttcttgtctggcaaagaggccaaggacgcagatggcaacaaacccaaggaacctgggataacggaggcttcatcggagataatatcaccaaacatgttgctggtgattataataccatttaggtgggttgggttcttaactaggatcatggcggcagaatcaatcaattgatgttgaaccttcaatgtagggaattcgttcttgatggtttcctccacagtttttctccataatcttgaagaggccaaaacattagctttatccaaggaccaaataggcaatggtggctcatgttgtagggccatgaaagcggccattcttgtgattctttgcacttctggaacggtgtattgttcactatcccaagcgacaccatcaccatcgtcttcctttctcttaccaaagtaaatacctcccactaattctctgacaacaacgaagtcagtacctttagcaaattgtggcttgattggagataagtctaaaagagagtcggatgcaaagttacatggtcttaagttggcgtacaattgaagttctttacggatttttagtaaaccttgttcaggtctaacactaccggtaccccatttaggaccacccacagcacctaacaaaacggcatcaaccttcttggaggcttccagcgcctcatctggaagtgggacacctgtagcatcgatagcagcaccaccaattaaatgattttcgaaatcgaacttgacattggaacgaacatcagaaatagctttaagaaccttaatggcttcggctgtgatttcttgaccaacgtggtctcctggcaaaacgacgatcttcttaggggcagacataggggcagacattagaatggtatatccttgaaatatatatatatattgctgaaatgtaaaaggtaagaaaagttagaaagtaagacgattgctaaccacctattggaaaaaacaataggtccttaaataatattgtcaacttcaagtattgtgatgcaagcatttagtcatgaacgcttctctattctatatgaaaagccggttccggcctctcacctttcctttttctcccaatttttcagttgaaaaaggtatatgcgtcaggcgacctctgaaattaacaaaaaatttccagtcatcgaatttgattctgtgcgatagcgcccctgtgtgttctcgttatgttgaggaaaaaaatagcatgcaagcttggcgtaatcatggtcatagctgtttcctgtgtgaaattgttatccgctcacaattccacacaacatacgagccggaagcataaagtgtaaagcctggggtgcctaatgagtgagctaactcacattaattgcgttgcgctcact

SEQ ID NO: 23 - DNA, 9242 bp, synthetic construct
  misc_feature 1..9242: note = Fragment B
  source 1..9242: mol_type = other DNA
tcgcgcgtttcggtgatgacggtgaaaacctctgacacatgcagctcccggagacggtcacagcttgtctgtaagcggatgccgggagcagacaagcccgtcagggcgcgtcagcgggtgttggcgggtgtcggggctggcttaactatgcggcatcagagcagattgtactgagagtgcaccatatgcggtgtgaaataccgcacagatgcgtaaggagaaaataccgcatcaggcgccattcgccattcaggctgcgcaactgttgggaagggcgatcggtgcgggcctcttcgctattacgccagctggcgaaagggggatgtgctgcaaggcgattaagttgggtaacgccagggttttcccagtcacgacgttgtaaaacgacggccagtgaattcgagctcggtacctcgcgaatgcatctagatggtctctagttacacttgtgttcctttttgttgctgctattttctatttaataacacctgttcatgtcatgtctaaacatactgacttttcaagtgaaatcataggatacaaggctattgatggtggtgtcactcgtgacatagcatctacagatacttgttttgctaacaaacatgctgattttgacacatggtttagccagcgtggtggtagttatactaatgacaaagcttgcccattgattgctgcagtcataacaagagaagtgggttttgtcgtgcctggtttgcctggcacgatattacgcacaactaatggtgactttttgcatttcttacctagagtttttagtgcagttggtaacatctgttacacaccatcaaaacttatagagtacactgactttgcaacatcagcttgtgttttggctgctgaatgtacaatttttaaagatgcttctggtaagccagtaccatattgttatgataccaatgtactagaaggttctgttgcttatgaaagtttacgccctgacacacgttatgtgctcatggatggctctattattcaatttcctaacacctaccttgaaggttctgttagagtggtaacaacttttgattctgagtactgtaggcacggcacttgtgaaagatcagaagctggtgtttgtgtatctactagtggtagatgggtacttaacaatgattattacagatctttaccaggagttttctgtggtgtagatgctgtaaatttacttactaatatgtttacaccactaattcaacctattggtgctttggacatatcagcatctatagtagctggtggtattgtagctatcgtagtaacatgccttgcctactattttatgaggtttagaagagcttttggtgaatacagtcatgtagttgcctttaatactttactattccttatgtcattcactgtactctgtttaacaccagtttactcattcttacctggtgtttattctgttatttacttgtacttgacattttatcttactaatgatgtttcttttttagcacatattcagtggatggttatgttcacacctttagtacctttctggataacaattgcttatatcatttgtatttccacaaagcatttctattggttctttagtaattacctaaagagacgtgtagtctttaatggtgtttcctttagtacttttgaagaagctgcgctgtgcacctttttgttaaataaagaaatgtatctaaagttgcgtagtgatgtgctattacctcttacgcaatataatagatacttagctctttataataagtacaagtattttagtggagcaatggatacaactagctacagagaagctgcttgttgtcatctcgcaaaggctctcaatgacttcagtaactcaggttctgatgttctttaccaaccaccacaaacctctatcacctcagctgttttgcagagtggttttagaaaaatggcattcccatctggtaaagttgagggttgtatggtacaagtaacttgtggtacaactacacttaacggtctttggcttgatgacgtagtttactgtccaagacatgtgatctgcacctctgaagacatgcttaaccctaattatgaagatttactcattcgtaagtctaatcataatttcttggtacaggctggtaatgttcaactcagggttattggacattctatgcaaaattgtgtacttaagcttaaggttgatacagccaatcctaagacacctaagtataagtttgttcgcattcaaccaggacagactttttcagtgttagcttgttacaatggttcaccatctggtgtttaccaatgtgctatgaggcccaatttcactattaagggttcattccttaatggttcatgtggtagtgttggttttaacatagattatgactgtgtctctttttgttacatgcaccatatggaattaccaactggagttcatgctggcacagacttagaaggtaacttttatggaccttttgttgacaggcaaacagcacaagcagctggtacggacacaactattacagttaatgttttagcttggttgtacgctgctgttataaatggagacaggtggtttctcaatcgatttaccacaactcttaatgactttaaccttgtggctatgaagtacaattatgaacctctaacacaagaccatgttgacatactaggacctctttctgctcaaactggaattgccgttttagatatgtgtgcttcattaaaagaattactgcaaaatggtatgaatggacgtaccatattgggtagtgctttattagaagatgaatttacaccttttgatgttgttagacaatgctcaggtgttactttccaaagtgcagtgaaaagaacaatcaagggtacacaccactggttgttactcacaattttgacttcacttttagttttagtccagagtactcaatggtctttgttcttttttttgtatgaaaatgcctttttaccttttgctatgggtattattgctatgtctgcttttgcaatgatgtttgtcaaacataagcatgcatttctctgtttgtttttgttaccttctcttgccactgtagcttattttaatatggtctatatgcctgctagttgggtgatgcgtattatgacatggttggatatggttgatactagtttgtctggttttaagctaaaagactgtgttatgtatgcatcagctgtagtgttactaatccttatgacagcaagaactgtgtatgatgatggtgctaggagagtgtggacacttatgaatgtcttgacactcgtttataaagtttattatggtaatgctttagatcaagccatttccatgtgggctcttataatctctgttacttctaactactcaggtgtagttacaactgtcatgtttttggccagaggtattgtttttatgtgtgttgagtattgccctattttcttcataactggtaatacacttcagtgtataatgctagtttattgtttcttaggctatttttgtacttgttactttggcctcttttgtttactcaaccgctactttagactgactcttggtgtttatgattacttagtttctacacaggagtttagatatatgaattcacagggactactcccacccaagaatagcatagatgccttcaaactcaacattaaattgttgggtgttggtggcaaaccttgtatcaaagtagccactgtacagtctaaaatgtcagatgtaaagtgcacatcagtagtcttactctcagttttgcaacaactcagagtagaatcatcatctaaattgtgggctcaatgtgtccagttacacaatgacattctcttagctaaagatactactgaagcctttgaaaaaatggtttcactactttctgttttgctttccatgcagggtgctgtagacataaacaagctttgtgaagaaatgctggacaacagggcaaccttacaagctatagcctcagagtttagttcccttccatcatatgcagcttttgctactgctcaagaagcttatgagcaggctgttgctaatggtgattctgaagttgttcttaaaaagttgaagaagtctttgaatgtggctaaatctgaatttgaccgtgatgcagccatgcaacgtaagttggaaaagatggctgatcaagctatgacccaaatgtataaacaggctagatctgaggacaagagggcaaaagttactagtgctatgcagacaatgcttttcactatgcttagaaagttggataatgatgcactcaacaacattatcaacaatgcaagagatggttgtgttcccttgaacataatacctcttacaacagcagccaaactaatggttgtcataccagactataacacatataaaaatacgtgtgatggtacaacatttacttatgcatcagcattgtgggaaatccaacaggttgtagatgcagatagtaaaattgttcaacttagtgaaattagtatggacaattcacctaatttagcatggcctcttattgtaacagctttaagggccaattctgctgtcaaattacagaataatgagcttagtcctgttgcactacgacagatgtcttgtgctgccggtactacacaaactgcttgcactgatgacaatgcgttagcttactacaacacaacaaagggaggtaggtttgtacttgcactgttatccgatttacaggatttgaaatgggctagattccctaagagtgatggaactggtactatctatacagaactggaaccaccttgtaggtttgttacagacacacctaaaggtcctaaagtgaagtatttatactttattaaaggattaaacaacctaaatagaggtatggtacttggtagtttagctgccacagtacgtctacaagctggtaatgcaacagaagtgcctgccaattcaactgtattatctttctgtgcttttgctgtagatgctgctaaagcttacaaagattatctagctagtgggggacaaccaatcactaattgtgttaagatgttgtgtacacacactggtactggtcaggcaataacagttacaccggaagccaatatggatcaagaatcctttggtggtgcatcgtgttgtctgtactgccgttgccacatagatcatccaaatcctaaaggattttgtgacttaaaaggtaagtatgtacaaatacctacaacttgtgctaatgaccctgtgggttttacacttaaaaacacagtctgtaccgtctgcggtatgtggaaaggttatggctgtagttgtgatcaactccgcgaacccatgcttcagtcagctgatgcacaatcgtttttaaacgggtttgcggtgtaagtgcagcccgtcttacaccgtgcggcacaggcactagtactgatgtcgtatacagggcttttgacatctacaatgataaagtagctggttttgctaaattcctaaaaactaattgttgtcgcttccaagaaaaggacgaagatgacaatttaattgattcttactttgtagttaagagacacactttctctaactaccaacatgaagaaacaatttataatttacttaaggattgtccagctgttgctaaacatgacttctttaagtttagaatagacggtgacatggtaccacatatatcacgtcaacgtcttactaaatacacaatggcagacctcgtctatgctttaaggcattttgatgaaggtaattgtgacacattaaaagaaatacttgtcacatacaattgttgtgatgatgattatttcaataaaaaggactggtatgattttgtagaaaacccagatatattacgcgtatacgccaacttaggtgaacgtgtacgccaagctttgttaaaaacagtacaattctgtgatgccatgcgaaatgctggtattgttggtgtactgacattagataatcaagatctcaatggtaactggtatgatttcggtgatttcatacaaaccacgccaggtagtggagttcctgttgtagattcttattattcattgttaatgcctatattaaccttgaccagggctttaactgcagagtcacatgttgacactgacttaacaaagccttacattaagtgggatttgttaaaatatgacttcacggaagagaggttaaaactctttgaccgttattttaaatattgggatcagacataccacccaaattgtgttaactgtttggatgacagatgcattctgcattgtgcaaactttaatgttttattctctacagtgttcccacttacaagttttggaccactagtgagaaaaatatttgttgatggtgttccatttgtagtttcaactggataccacttcagagagctaggtgttgtacataatcaggatgtaaatttacatagctctagacttagttttaaggaattacttgtgtatgctgctgaccctgctatgcacgctgcttctggtaatctattactagataaacgcactacgtgcttttcagtagctgcacttactaacaatgttgcttttcaaactgtcaaacccggtaattttaacaaagacttctatgactttgctgtgtctaagggtttctttaaggaaggaagttctgttgaattaaaacacttcttctttgctcaggatggtaatgctgctatcagcgattatgactactatcgttataatctaccaacaatgtgtgatatcagacaactactatttgtagttgaagttgttgataagtactttgattgttacgatggtggctgtattaatgctaaccaagtcatcgtcaacaacctagacaaatcagctggttttccatttaataaatggggtaaggctagactttattatgattcaatgagttatgaggatcaagatgcacttttcgcatatacaaaacgtaatgtcatccctactataactcaaatgaatcttaagtatgccattagtgcaaagaatagagctcgcactgagaccatcggatcccgggcccgtcgactgcagaggcctgcatgcaagcttggcgtaatcatggtcatagctgtttcctgtgtgaaattgttatccgctcacaattccacacaacatacgagccggaagcataaagtgtaaagcctggggtgcctaatgagtgagctaactcacattaattgcgttgcgctcactgcccgctttccagtcgggaaacctgtcgtgccagctgcattaatgaatcggccaacgcgcggggagaggcggtttgcgtattgggcgctcttccgcttcctcgctcactgactcgctgcgctcggtcgttcggctgcggcgagcggtatcagctcactcaaaggcggtaatacggttatccacagaatcaggggataacgcaggaaagaacatgtgagcaaaaggccagcaaaaggccaggaaccgtaaaaaggccgcgttgctggcgtttttccataggctccgcccccctgacgagcatcacaaaaatcgacgctcaagtcagaggtggcgaaacccgacaggactataaagataccaggcgtttccccctggaagctccctcgtgcgctctcctgttccgaccctgccgcttaccggatacctgtccgcctttctcccttcgggaagcgtggcgctttctcatagctcacgctgtaggtatctcagttcggtgtaggtcgttcgctccaagctgggctgtgtgcacgaaccccccgttcagcccgaccgctgcgccttatccggtaactatcgtcttgagtccaacccggtaagacacgacttatcgccactggcagcagccactggtaacaggattagcagagcgaggtatgtaggcggtgctacagagttcttgaagtggtggcctaactacggctacactagaagaacagtatttggtatctgcgctctgctgaagccagttaccttcggaaaaagagttggtagctcttgatccggcaaacaaaccaccgctggtagcggtggtttttttgtttgcaagcagcagattacgcgcagaaaaaaaggatctcaagaagatcctttgatcttttctacggggtctgacgctcagtggaacgaaaactcacgttaagggattttggtcatgagattatcaaaaaggatcttcacctagatccttttaaattaaaaatgaagttttaaatcaatctaaagtatatatgagtaaacttggtctgacagttaccaatgcttaatcagtgaggcacctatctcagcgatctgtctatttcgttcatccatagttgcctgactccccgtcgtgtagataactacgatacgggagggcttaccatctggccccagtgctgcaatgataccgcgagacccacgctcaccggctccagatttatcagcaataaaccagccagccggaagggccgagcgcagaagtggtcctgcaactttatccgcctccatccagtctattaattgttgccgggaagctagagtaagtagttcgccagttaatagtttgcgcaacgttgttgccattgctacaggcatcgtggtgtcacgctcgtcgtttggtatggcttcattcagctccggttcccaacgatcaaggcgagttacatgatcccccatgttgtgcaaaaaagcggttagctccttcggtcctccgatcgttgtcagaagtaagttggccgcagtgttatcactcatggttatggcagcactgcataattctcttactgtcatgccatccgtaagatgcttttctgtgactggtgagtactcaaccaagtcattctgagaatagtgtatgcggcgaccgagttgctcttgcccggcgtcaatacgggataataccgcgccacatagcagaactttaaaagtgctcatcattggaaaacgttcttcggggcgaaaactctcaaggatcttaccgctgttgagatccagttcgatgtaacccactcgtgcacccaactgatcttcagcatcttttactttcaccagcgtttctgggtgagcaaaaacaggaaggcaaaatgccgcaaaaaagggaataagggcgacacggaaatgttgaatactcatactcttcctttttcaatattattgaagcatttatcagggttattgtctcatgagcggatacatatttgaatgtatttagaaaaataaacaaataggggttccgcgcacatttccccgaaaagtgccacctgacgtctaagaaaccattattatcatgacattaacctataaaaataggcgtatcacgaggccctttcgtc

SEQ ID NO: 24 - DNA, 8583 bp, synthetic construct
  misc_feature 1..8583: note = Fragment C
  source 1..8583: mol_type = other DNA
tcgcgcgtttcggtgatgacggtgaaaacctctgacacatgcagctcccggagacggtcacagcttgtctgtaagcggatgccgggagcagacaagcccgtcagggcgcgtcagcgggtgttggcgggtgtcggggctggcttaactatgcggcatcagagcagattgtactgagagtgcaccatatgcggtgtgaaataccgcacagatgcgtaaggagaaaataccgcatcaggcgccattcgccattcaggctgcgcaactgttgggaagggcgatcggtgcgggcctcttcgctattacgccagctggcgaaagggggatgtgctgcaaggcgattaagttgggtaacgccagggttttcccagtcacgacgttgtaaaacgacggccagtgaattcgagctcggtacctcgcgaatgcatctagatcacctgcgctcgcaccgtagctggtgtctctatctgtagtactatgaccaatagacagtttcatcaaaaattattgaaatcaatagccgccactagaggagctactgtagtaattggaacaagcaaattctatggtggttggcacaacatgttaaaaactgtttatagtgatgtagaaaaccctcaccttatgggttgggattatcctaaatgtgatagagccatgcctaatatgcttagaattatggcctcacttgttcttgctcgcaaacatacaacgtgttgtagcttgtcacaccgtttctatagattagctaatgagtgtgctcaagtattgagtgaaatggtcatgtgtggcggttcactatatgttaaaccaggtggaacctcatcaggagatgccacaactgcttatgctaatagtgtttttaacatttgtcaagctgtcacggccaatgttaatgcacttttatctactgatggtaacaaaattgccgataagtatgtccgcaatttacaacacagactttatgagtgtctctatagaaatagagatgttgacacagactttgtgaatgagttttacgcatatttgcgtaaacatttctcaatgatgatactctctgacgatgctgttgtgtgtttcaatagcacttatgcatctcaaggtctagtggctagcataaagaactttaagtcagttctttattatcaaaacaatgtttttatgtctgaagcaaaatgttggactgagactgaccttactaaaggacctcatgaattttgctctcaacatacaatgctagttaaacagggtgatgattatgtgtaccttccttacccagatccatcaagaatcctaggggccggctgttttgtagatgatatcgtaaaaacagatggtacacttatgattgaacggttcgtgtctttagctatagatgcttacccacttactaaacatcctaatcaggagtatgctgatgtctttcatttgtacttacaatacataagaaagctacatgatgagttaacaggacacatgttagacatgtattctgttatgcttactaatgataacacttcaaggtattgggaacctgagttttatgaggctatgtacacaccgcatacagtcttacaggctgttggggcttgtgttctttgcaattcacagacttcattaagatgtggtgcttgcatacgtagaccattcttatgttgtaaatgctgttacgaccatgtcatatcaacatcacataaattagtcttgtctgttaatccgtatgtttgcaatgctccaggttgtgatgtcacagatgtgactcaactttacttaggaggtatgagctattattgtaaatcacataaaccacccattagttttccattgtgtgctaatggacaagtttttggtttatataaaaatacatgtgttggtagcgataatgttactgactttaatgcaattgcaacatgtgactggacaaatgctggtgattacattttagctaacacctgtactgaaagactcaagctttttgcagcagaaacgctcaaagctactgaggagacatttaaactgtcttatggtattgctactgtacgtgaagtgctgtctgacagagaattacatctttcatgggaagttggtaaacctagaccaccacttaaccgaaattatgtctttactggttatcgtgtaactaaaaacagtaaagtacaaataggagagtacacctttgaaaaaggtgactatggtgatgctgttgtttaccgaggtacaacaacttacaaattaaatgttggtgattattttgtgctgacatcacatacagtaatgccattaagtgcacctacactagtgccacaagagcactatgttagaattactggcttatacccaacactcaatatctcagatgagttttctagcaatgttgcaaattatcaaaaggttggtatgcaaaagtattctacactccagggaccacctggtactggtaagagtcattttgctattggcctagctctctactacccttctgctcgcatagtgtatacagcttgctctcatgccgctgttgatgcactatgtgagaaggcattaaaatatttgcctatagataaatgtagtagaattatacctgcacgtgctcgtgtagagtgttttgataaattcaaagtgaattcaacattagaacagtatgtcttttgtactgtaaatgcattgcctgagacgacagcagatatagttgtctttgatgaaatttcaatggccacaaattatgatttgagtgttgtcaatgccagattacgtgctaagcactatgtgtacattggcgaccctgctcaattacctgcaccacgcacattgctaactaagggcacactagaaccagaatatttcaattcagtgtgtagacttatgaaaactataggtccagacatgttcctcggaacttgtcggcgttgtcctgctgaaattgttgacactgtgagtgctttggtttatgataataagcttaaagcacataaagacaaatcagctcaatgctttaaaatgttttataagggtgttatcacgcatgatgtttcatctgcaattaacaggccacaaataggcgtggtaagagaattccttacacgtaaccctgcttggagaaaagctgtctttatttcaccttataattcacagaatgctgtagcctcaaagattttgggactaccaactcaaactgttgattcatcacagggctcagaatatgactatgtcatattcactcaaaccactgaaacagctcactcttgtaatgtaaacagatttaatgttgctattaccagagcaaaagtaggcatactttgcataatgtctgatagagacctttatgacaagttgcaatttacaagtcttgaaattccacgtaggaatgtggcaactttacaagctgaaaatgtaacaggactctttaaagattgtagtaaggtaatcactgggttacatcctacacaggcacctacacacctcagtgttgacactaaattcaaaactgaaggtttatgtgttgacatacctggcatacctaaggacatgacctatagaagactcatctctatgatgggttttaaaatgaattatcaagttaatggttaccctaacatgtttatcacccgcgaagaagctataagacatgtacgtgcatggattggcttcgatgtcgaggggtgtcatgctactagagaagctgttggtaccaatttacctttacagctaggtttttctacaggtgttaacctagttgctgtacctacaggttatgttgatacacctaataatacagatttttccagagttagtgctaaaccaccgcctggagatcaatttaaacacctcataccacttatgtacaaaggacttccttggaatgtagtgcgtataaagattgtacaaatgttaagtgacacacttaaaaatctctctgacagagtcgtatttgtcttatgggcacatggctttgagttgacatctatgaagtattttgtgaaaataggacctgagcgcacctgttgtctatgtgatagacgtgccacatgcttttccactgcttcagacacttatgcctgttggcatcattctattggatttgattacgtctataatccgtttatgattgatgttcaacaatggggttttacaggtaacctacaaagcaaccatgatctgtattgtcaagtccatggtaatgcacatgtagctagttgtgatgcaatcatgactaggtgtctagctgtccacgagtgctttgttaagcgtgttgactggactattgaatatcctataattggtgatgaactgaagattaatgcggcttgtagaaaggttcaacacatggttgttaaagctgcattattagcagacaaattcccagttcttcacgacattggtaaccctaaagctattaagtgtgtacctcaagctgatgtagaatggaagttctatgatgcacagccttgtagtgacaaagcttataaaatagaagaattattctattcttatgccacacattctgacaaattcacagatggtgtatgcctattttggaattgcaatgtcgatagatatcctgctaattccattgtttgtagatttgacactagagtgctatctaaccttaacttgcctggttgtgatggtggcagtttgtatgtaaataaacatgcattccacacaccagcttttgataaaagtgcttttgttaatttaaaacaattaccatttttctattactctgacagtccatgtgagtctcatggaaaacaagtagtgtcagatatagattatgtaccactaaagtctgctacgtgtataacacgttgcaatttaggtggtgctgtctgtagacatcatgctaatgagtacagattgtatctcgatgcttataacatgatgatctcagctggctttagcttgtgggtttacaaacaatttgatacttataacctctggaacacttttacaagacttcagagtttagaaaatgtggcttttaatgttgtaaataagggacactttgatggacaacagggtgaagtaccagtttctatcattaataacactgtttacacaaaagttgatggtgttgatgtagaattgtttgaaaataaaacaacattacctgttaatgtagcatttgagctttgggctaagcgcaacattaaaccagtaccagaggtgaaaatactcaataatttgggtgtggacattgctgctaatactgtgatctgggactacaaaagagatgctccagcacatatatctactattggtgtttgttctatgactgacatagccaagaaaccaactgaaacgatttgtgcaccactcactgtcttttttgatggtagagttgatggtcaagtagacttatttagaaatgcccgtaatggtgttcttattacagaaggtagtgttaaaggtttacaaccatctgtaggtcccaaacaagctagtcttaatggagtcacattaattggagaagccgtaaaaacacagttcaattattataagaaagttgatggtgttgtccaacaattacctgaaacttactttactcagagtagaaatttacaagaatttaaacccaggagtcaaatggaaattgatttcttagaattagctatggatgaattcattgaacggtataaattagaaggctatgccttcgaacatatcgtttatggagattttagtcatagtcagttaggtggtttacatctactgattggactagctaaacgttttaaggaatcaccttttgaattagaagattttattcctatggacagtacagttaaaaactatttcataacagatgcgcaaacaggttcatctaagtgtgtgtgttctgttattgatttattacttgatgattttgttgaaataataaaatcccaagatttatctgtagtttctaaggttgtcaaagtgactattgactatacagaaatttcatttatgctttggtgtaaagatggccatgtagaaacattttacccaaaattacaatctagtcaagcgtggcaaccgggtgttgctatgcctaatctttacaaaatgcaaagaatgctattagaaaagtgtgaccttcaaaattatggtgatagtgcaacattacctaaaggcataatgatgaatgtcgcaaaatatactcaactgtgtcaatatttaaacacattaacattagctgtaccctataatatgagagttatacattttggtgctggttctgataaaggagttgcaccaggtacagctgttttaagacagtggttgcctacgggtacgctgcttgtcgactcagatcttgcaggtgatcggatcccgggcccgtcgactgcagaggcctgcatgcaagcttggcgtaatcatggtcatagctgtttcctgtgtgaaattgttatccgctcacaattccacacaacatacgagccggaagcataaagtgtaaagcctggggtgcctaatgagtgagctaactcacattaattgcgttgcgctcactgcccgctttccagtcgggaaacctgtcgtgccagctgcattaatgaatcggccaacgcgcggggagaggcggtttgcgtattgggcgctcttccgcttcctcgctcactgactcgctgcgctcggtcgttcggctgcggcgagcggtatcagctcactcaaaggcggtaatacggttatccacagaatcaggggataacgcaggaaagaacatgtgagcaaaaggccagcaaaaggccaggaaccgtaaaaaggccgcgttgctggcgtttttccataggctccgcccccctgacgagcatcacaaaaatcgacgctcaagtcagaggtggcgaaacccgacaggactataaagataccaggcgtttccccctggaagctccctcgtgcgctctcctgttccgaccctgccgcttaccggatacctgtccgcctttctcccttcgggaagcgtggcgctttctcatagctcacgctgtaggtatctcagttcggtgtaggtcgttcgctccaagctgggctgtgtgcacgaaccccccgttcagcccgaccgctgcgccttatccggtaactatcgtcttgagtccaacccggtaagacacgacttatcgccactggcagcagccactggtaacaggattagcagagcgaggtatgtaggcggtgctacagagttcttgaagtggtggcctaactacggctacactagaagaacagtatttggtatctgcgctctgctgaagccagttaccttcggaaaaagagttggtagctcttgatccggcaaacaaaccaccgctggtagcggtggtttttttgtttgcaagcagcagattacgcgcagaaaaaaaggatctcaagaagatcctttgatcttttctacggggtctgacgctcagtggaacgaaaactcacgttaagggattttggtcatgagattatcaaaaaggatcttcacctagatccttttaaattaaaaatgaagttttaaatcaatctaaagtatatatgagtaaacttggtctgacagttaccaatgcttaatcagtgaggcacctatctcagcgatctgtctatttcgttcatccatagttgcctgactccccgtcgtgtagataactacgatacgggagggcttaccatctggccccagtgctgcaatgataccgcgagacccacgctcaccggctccagatttatcagcaataaaccagccagccggaagggccgagcgcagaagtggtcctgcaactttatccgcctccatccagtctattaattgttgccgggaagctagagtaagtagttcgccagttaatagtttgcgcaacgttgttgccattgctacaggcatcgtggtgtcacgctcgtcgtttggtatggcttcattcagctccggttcccaacgatcaaggcgagttacatgatcccccatgttgtgcaaaaaagcggttagctccttcggtcctccgatcgttgtcagaagtaagttggccgcagtgttatcactcatggttatggcagcactgcataattctcttactgtcatgccatccgtaagatgcttttctgtgactggtgagtactcaaccaagtcattctgagaatagtgtatgcggcgaccgagttgctcttgcccggcgtcaatacgggataataccgcgccacatagcagaactttaaaagtgctcatcattggaaaacgttcttcggggcgaaaactctcaaggatcttaccgctgttgagatccagttcgatgtaacccactcgtgcacccaactgatcttcagcatcttttactttcaccagcgtttctgggtgagcaaaaacaggaaggcaaaatgccgcaaaaaagggaataagggcgacacggaaatgttgaatactcatactcttcctttttcaatattattgaagcatttatcagggttattgtctcatgagcggatacatatttgaatgtatttagaaaaataaacaaataggggttccgcgcacatttccccgaaaagtgccacctgacgtctaagaaaccattattatcatgacattaacctataaaaataggcgtatcacgaggccctttcgtc

SEQ ID NO: 25 - DNA, 13455 bp, synthetic construct; identical to SEQ ID NO: 12
  misc_feature 1..13455: note = Fragment D1
  source 1..13455: mol_type = other DNA

SEQ ID NO: 26 - DNA, 13817 bp, synthetic construct; identical to SEQ ID NO: 11
  misc_feature 1..13817: note = Fragment D2
  source 1..13817: mol_type = other DNA

SEQ ID NO: 27 - DNA, 5751 bp, synthetic construct
  misc_feature 1..5751: note = pcDNA3.1/Hygro(+)_E
  source 1..5751: mol_type = other DNA
gacggatcgggagatctcccgatcccctatggtcgactctcagtacaatctgctctgatgccgcatagttaagccagtatctgctccctgcttgtgtgttggaggtcgctgagtagtgcgcgagcaaaatttaagctacaacaaggcaaggcttgaccgacaattgcatgaagaatctgcttagggttaggcgttttgcgctgcttcgcgatgtacgggccagatatacgcgttgacattgattattgactagttattaatagtaatcaattacggggtcattagttcatagcccatatatggagttccgcgttacataacttacggtaaatggcccgcctggctgaccgcccaacgacccccgcccattgacgtcaataatgacgtatgttcccatagtaacgccaatagggactttccattgacgtcaatgggtggactatttacggtaaactgcccacttggcagtacatcaagtgtatcatatgccaagtacgccccctattgacgtcaatgacggtaaatggcccgcctggcattatgcccagtacatgaccttatgggactttcctacttggcagtacatctacgtattagtcatcgctattaccatggtgatgcggttttggcagtacatcaatgggcgtggatagcggtttgactcacggggatttccaagtctccaccccattgacgtcaatgggagtttgttttggcaccaaaatcaacgggactttccaaaatgtcgtaacaactccgccccattgacgcaaatgggcggtaggcgtgtacggtgggaggtctatataagcagagctctctggctaactagagaacccactgcttactggcttatcgaaattaatacgactcactatagggagacccaagctggctagcgccaccatgtactcattcgtttcggaagagacaggtacgttaatagttaatagcgtacttctttttcttgctttcgtggtattcttgctagttacactagccatccttactgcgcttcgattgtgtgcgtactgctgcaatattgttaacgtgagtcttgtaaaaccttctttttacgtttactctcgtgttaaaaatctgaattcttctagagttcctgatcttctggtctaactcgagtctagagggcccgtttaaacccgctgatcagcctcgactgtgccttctagttgccagccatctgttgtttgcccctcccccgtgccttccttgaccctggaaggtgccactcccactgtcctttcctaataaaatgaggaaattgcatcgcattgtctgagtaggtgtcattctattctggggggtggggtggggcaggacagcaagggggaggattgggaagacaatagcaggcatgctggggatgcggtgggctctatggcttctgaggcggaaagaaccagctggggctctagggggtatccccacgcgccctgtagcggcgcattaagcgcggcgggtgtggtggttacgcgcagcgtgaccgctacacttgccagcgccctagcgcccgctcctttcgctttcttcccttcctttctcgccacgttcgccggctttccccgtcaagctctaaatcggggcatccctttagggttccgatttagtgctttacggcacctcgaccccaaaaaacttgattagggtgatggttcacgtagtgggccatcgccctgatagacggtttttcgccctttgacgttggagtccacgttctttaatagtggactcttgttccaaactggaacaacactcaaccctatctcggtctattcttttgatttataagggattttggggatttcggcctattggttaaaaaatgagctgatttaacaaaaatttaacgcgaattaattctgtggaatgtgtgtcagttagggtgtggaaagtccccaggctccccaggcaggcagaagtatgcaaagcatgcatctcaattagtcagcaaccaggtgtggaaagtccccaggctccccagcaggcagaagtatgcaaagcatgcatctcaattagtcagcaaccatagtcccgcccctaactccgcccatcccgcccctaactccgcccagttccgcccattctccgccccatggctgactaattttttttatttatgcagaggccgaggccgcctctgcctctgagctattccagaagtagtgaggaggcttttttggaggcctaggcttttgcaaaaagctcccgggagcttgtatatccattttcggatctgatcagcacgtgatgaaaaagcctgaactcaccgcgacgtctgtcgagaagtttctgatcgaaaagttcgacagcgtctccgacctgatgcagctctcggagggcgaagaatctcgtgctttcagcttcgatgtaggagggcgtggatatgtcctgcgggtaaatagctgcgccgatggtttctacaaagatcgttatgtttatcggcactttgcatcggccgcgctcccgattccggaagtgcttgacattggggaattcagcgagagcctgacctattgcatctcccgccgtgcacagggtgtcacgttgcaagacctgcctgaaaccgaactgcccgctgttctgcagccggtcgcggaggccatggatgcgatcgctgcggccgatcttagccagacgagcgggttcggcccattcggaccgcaaggaatcggtcaatacactacatggcgtgatttcatatgcgcgattgctgatccccatgtgtatcactggcaaactgtgatggacgacaccgtcagtgcgtccgtcgcgcaggctctcgatgagctgatgctttgggccgaggactgccccgaagtccggcacctcgtgcacgcggatttcggctccaacaatgtcctgacggacaatggccgcataacagcggtcattgactggagcgaggcgatgttcggggattcccaatacgaggtcgccaacatcttcttctggaggccgtggttggcttgtatggagcagcagacgcgctacttcgagcggaggcatccggagcttgcaggatcgccgcggctccgggcgtatatgctccgcattggtcttgaccaactctatcagagcttggttgacggcaatttcgatgatgcagcttgggcgcagggtcgatgcgacgcaatcgtccgatccggagccgggactgtcgggcgtacacaaatcgcccgcagaagcgcggccgtctggaccgatggctgtgtagaagtactcgccgatagtggaaaccgacgccccagcactcgtccgagggcaaaggaatagcacgtgctacgagatttcgattccaccgccgccttctatgaaaggttgggcttcggaatcgttttccgggacgccggctggatgatcctccagcgcggggatctcatgctggagttcttcgcccaccccaacttgtttattgcagcttataatggttacaaataaagcaatagcatcacaaatttcacaaataaagcatttttttcactgcattctagttgtggtttgtccaaactcatcaatgtatcttatcatgtctgtataccgtcgacctctagctagagcttggcgtaatcatggtcatagctgtttcctgtgtgaaattgttatccgctcacaattccacacaacatacgagccggaagcataaagtgtaaagcctggggtgcctaatgagtgagctaactcacattaattgcgttgcgctcactgcccgctttccagtcgggaaacctgtcgtgccagctgcattaatgaatcggccaacgcgcggggagaggcggtttgcgtattgggcgctcttccgcttcctcgctcactgactcgctgcgctcggtcgttcggctgcggcgagcggtatcagctcactcaaaggcggtaatacggttatccacagaatcaggggataacgcaggaaagaacatgtgagcaaaaggccagcaaaaggccaggaaccgtaaaaaggccgcgttgctggcgtttttccataggctccgcccccctgacgagcatcacaaaaatcgacgctcaagtcagaggtggcgaaacccgacaggactataaagataccaggcgtttccccctggaagctccctcgtgcgctctcctgttccgaccctgccgcttaccggatacctgtccgcctttctcccttcgggaagcgtggcgctttctcaatgctcacgctgtaggtatctcagttcggtgtaggtcgttcgctccaagctgggctgtgtgcacgaaccccccgttcagcccgaccgctgcgccttatccggtaactatcgtcttgagtccaacccggtaagacacgacttatcgccactggcagcagccactggtaacaggattagcagagcgaggtatgtaggcggtgctacagagttcttgaagtggtggcctaactacggctacactagaaggacagtatttggtatctgcgctctgctgaagccagttaccttcggaaaaagagttggtagctcttgatccggcaaacaaaccaccgctggtagcggtggtttttttgtttgcaagcagcagattacgcgcagaaaaaaaggatctcaagaagatcctttgatcttttctacggggtctgacgctcagtggaacgaaaactcacgttaagggattttggtcatgagattatcaaaaaggatcttcacctagatccttttaaattaaaaatgaagttttaaatcaatctaaagtatatatgagtaaacttggtctgacagttaccaatgcttaatcagtgaggcacctatctcagcgatctgtctatttcgttcatccatagttgcctgactccccgtcgtgtagataactacgatacgggagggcttaccatctggccccagtgctgcaatgataccgcgagacccacgctcaccggctccagatttatcagcaataaaccagccagccggaagggccgagcgcagaagtggtcctgcaactttatccgcctccatccagtctattaattgttgccgggaagctagagtaagtagttcgccagttaatagtttgcgcaacgttgttgccattgctacaggcatcgtggtgtcacgctcgtcgtttggtatggcttcattcagctccggttcccaacgatcaaggcgagttacatgatcccccatgttgtgcaaaaaagcggttagctccttcggtcctccgatcgttgtcagaagtaagttggccgcagtgttatcactcatggttatggcagcactgcataattctcttactgtcatgccatccgtaagatgcttttctgtgactggtgagtactcaaccaagtcattctgagaatagtgtatgcggcgaccgagttgctcttgcccggcgtcaatacgggataataccgcgccacatagcagaactttaaaagtgctcatcattggaaaacgttcttcggggcgaaaactctcaaggatcttaccgctgttgagatccagttcgatgtaacccactcgtgcacccaactgatcttcagcatcttttactttcaccagcgtttctgggtgagcaaaaacaggaaggcaaaatgccgcaaaaaagggaataagggcgacacggaaatgttgaatactcatactcttcctttttcaatattattgaagcatttatcagggttattgtctcatgagcggatacatatttgaatgtatttagaaaaataaacaaataggggttccgcgcacatttccccgaaaagtgccacctgacgtc

SEQ ID NO: 28 - DNA, 5709 bp, synthetic construct
  misc_feature 1..5709: note = pcDNA3.1/Hygro(+)_ORF6
  source 1..5709: mol_type = other DNA
gacggatcgggagatctcccgatcccctatggtcgactctcagtacaatctgctctgatgccgcatagttaagccagtatctgctccctgcttgtgtgttggaggtcgctgagtagtgcgcgagcaaaatttaagctacaacaaggcaaggcttgaccgacaattgcatgaagaatctgcttagggttaggcgttttgcgctgcttcgcgatgtacgggccagatatacgcgttgacattgattattgactagttattaatagtaatcaattacggggtcattagttcatagcccatatatggagttccgcgttacataacttacggtaaatggcccgcctggctgaccgcccaacgacccccgcccattgacgtcaataatgacgtatgttcccatagtaacgccaatagggactttccattgacgtcaatgggtggactatttacggtaaactgcccacttggcagtacatcaagtgtatcatatgccaagtacgccccctattgacgtcaatgacggtaaatggcccgcctggcattatgcccagtacatgaccttatgggactttcctacttggcagtacatctacgtattagtcatcgctattaccatggtgatgcggttttggcagtacatcaatgggcgtggatagcggtttgactcacggggatttccaagtctccaccccattgacgtcaatgggagtttgttttggcaccaaaatcaacgggactttccaaaatgtcgtaacaactccgccccattgacgcaaatgggcggtaggcgtgtacggtgggaggtctatataagcagagctctctggctaactagagaacccactgcttactggcttatcgaaattaatacgactcactatagggagacccaagctggctagcgccaccatgtttcatctcgttgactttcaggttactatagcagagatattactaattattatgaggacttttaaagtttccatttggaatcttgattacatcataaacctcataattaaaaatttatctaagtcactaactgagaataaatattctcaattagatgaagagcaaccaatggagattgattaactcgagtctagagggcccgtttaaacccgctgatcagcctcgactgtgccttctagttgccagccatctgttgtttgcccctcccccgtgccttccttgaccctggaaggtgccactcccactgtcctttcctaataaaatgaggaaattgcatcgcattgtctgagtaggtgtcattctattctggggggtggggtggggcaggacagcaagggggaggattgggaagacaatagcaggcatgctggggatgcggtgggctctatggcttctgaggcggaaagaaccagctggggctctagggggtatccccacgcgccctgtagcggcgcattaagcgcggcgggtgtggtggttacgcgcagcgtgaccgctacacttgccagcgccctagcgcccgctcctttcgctttcttcccttcctttctcgccacgttcgccggctttccccgtcaagctctaaatcggggcatccctttagggttccgatttagtgctttacggcacctcgaccccaaaaaacttgattagggtgatggttcacgtagtgggccatcgccctgatagacggtttttcgccctttgacgttggagtccacgttctttaatagtggactcttgttccaaactggaacaacactcaaccctatctcggtctattcttttgatttataagggattttggggatttcggcctattggttaaaaaatgagctgatttaacaaaaatttaacgcgaattaattctgtggaatgtgtgtcagttagggtgtggaaagtccccaggctccccaggcaggcagaagtatgcaaagcatgcatctcaattagtcagcaaccaggtgtggaaagtccccaggctccccagcaggcagaagtatgcaaagcatgcatctcaattagtcagcaaccatagtcccgcccctaactccgcccatcccgcccctaactccgcccagttccgcccattctccgccccatggctgactaattttttttatttatgcagaggccgaggccgcctctgcctctgagctattccagaagtagtgaggaggcttttttggaggcctaggcttttgcaaaaagctcccgggagcttgtatatccattttcggatctgatcagcacgtgatgaaaaagcctgaactcaccgcgacgtctgtcgagaagtttctgatcgaaaagttcgacagcgtctccgacctgatgcagctctcggagggcgaagaatctcgtgctttcagcttcgatgtaggagggcgtggatatgtcctgcgggtaaatagctgcgccgatggtttctacaaagatcgttatgtttatcggcactttgcatcggccgcgctcccgattccggaagtgcttgacattggggaattcagcgagagcctgacctattgcatctcccgccgtgcacagggtgtcacgttgcaagacctgcctgaaaccgaactgcccgctgttctgcagccggtcgcggaggccatggatgcgatcgctgcggccgatcttagccagacgagcgggttcggcccattcggaccgcaaggaatcggtcaatacactacatggcgtgatttcatatgcgcgattgctgatccccatgtgtatcactggcaaactgtgatggacgacaccgtcagtgcgtccgtcgcgcaggctctcgatgagctgatgctttgggccgaggactgccccgaagtccggcacctcgtgcacgcggatttcggctccaacaatgtcctgacggacaatggccgcataacagcggtcattgactggagcgaggcgatgttcggggattcccaatacgaggtcgccaacatcttcttctggaggccgtggttggcttgtatggagcagcagacgcgctacttcgagcggaggcatccggagcttgcaggatcgccgcggctccgggcgtatatgctccgcattggtcttgaccaactctatcagagcttggttgacggcaatttcgatgatgcagcttgggcgcagggtcgatgcgacgcaatcgtccgatccggagccgggactgtcgggcgtacacaaatcgcccgcagaagcgcggccgtctggaccgatggctgtgtagaagtactcgccgatagtggaaaccgacgccccagcactcgtccgagggcaaaggaatagcacgtgctacgagatttcgattccaccgccgccttctatgaaaggttgggcttcggaatcgttttccgggacgccggctggatgatcctccagcgcggggatctcatgctggagttcttcgcccaccccaacttgtttattgcagcttataatggttacaaataaagcaatagcatcacaaatttcacaaataaagcatttttttcactgcattctagttgtggtttgtccaaactcatcaatgtatcttatcatgtctgtataccgtcgacctctagctagagcttggcgtaatcatggtcatagctgtttcctgtgtgaaattgttatccgctcacaattccacacaacatacgagccggaagcataaagtgtaaagcctggggtgcctaatgagtgagctaactcacattaattgcgttgcgctcactgcccgctttccagtcgggaaacctgtcgtgccagctgcattaatgaatcggccaacgcgcggggagaggcggtttgcgtattgggcgctcttccgcttcctcgctcactgactcgctgcgctcggtcgttcggctgcggcgagcggtatcagctcactcaaaggcggtaatacggttatccacagaatcaggggataacgcaggaaagaacatgtgagcaaaaggccagcaaaaggccaggaaccgtaaaaaggccgcgttgctggcgtttttccataggctccgcccccctgacgagcatcacaaaaatcgacgctcaagtcagaggtggcgaaacccgacaggactataaagataccaggcgtttccccctggaagctccctcgtgcgctctcctgttccgaccctgccgcttaccggatacctgtccgcctttctcccttcgggaagcgtggcgctttctcaatgctcacgctgtaggtatctcagttcggtgtaggtcgttcgctccaagctgggctgtgtgcacgaaccccccgttcagcccgaccgctgcgccttatccggtaactatcgtcttgagtccaacccggtaagacacgacttatcgccactggcagcagccactggtaacaggattagcagagcgaggtatgtaggcggtgctacagagttcttgaagtggtggcctaactacggctacactagaaggacagtatttggtatctgcgctctgctgaagccagttaccttcggaaaaagagttggtagctcttgatccggcaaacaaaccaccgctggtagcggtggtttttttgtttgcaagcagcagattacgcgcagaaaaaaaggatctcaagaagatcctttgatcttttctacggggtctgacgctcagtggaacgaaaactcacgttaagggattttggtcatgagattatcaaaaaggatcttcacctagatccttttaaattaaaaatgaagttttaaatcaatctaaagtatatatgagtaaacttggtctgacagttaccaatgcttaatcagtgaggcacctatctcagcgatctgtctatttcgttcatccatagttgcctgactccccgtcgtgtagataactacgatacgggagggcttaccatctggccccagtgctgcaatgataccgcgagacccacgctcaccggctccagatttatcagcaataaaccagccagccggaagggccgagcgcagaagtggtcctgcaactttatccgcctccatccagtctattaattgttgccgggaagctagagtaagtagttcgccagttaatagtttgcgcaacgttgttgccattgctacaggcatcgtggtgtcacgctcgtcgtttggtatggcttcattcagctccggttcccaacgatcaaggcgagttacatgatcccccatgttgtgcaaaaaagcggttagctccttcggtcctccgatcgttgtcagaagtaagttggccgcagtgttatcactcatggttatggcagcactgcataattctcttactgtcatgccatccgtaagatgcttttctgtgactggtgagtactcaaccaagtcattctgagaatagtgtatgcggcgaccgagttgctcttgcccggcgtcaatacgggataataccgcgccacatagcagaactttaaaagtgctcatcattggaaaacgttcttcggggcgaaaactctcaaggatcttaccgctgttgagatccagttcgatgtaacccactcgtgcacccaactgatcttcagcatcttttactttcaccagcgtttctgggtgagcaaaaacaggaaggcaaaatgccgcaaaaaagggaataagggcgacacggaaatgttgaatactcatactcttcctttttcaatattattgaagcatttatcagggttattgtctcatgagcggatacatatttgaatgtatttagaaaaataaacaaataggggttccgcgcacatttccccgaaaagtgccacctgacgtc

SEQ ID NO: 29 - DNA, 5889 bp, synthetic construct
  misc_feature 1..5889: note = pcDNA3.1/Hygro(+)_ORF7a
  source 1..5889: mol_type = other DNA
gacggatcgggagatctcccgatcccctatggtcgactctcagtacaatctgctctgatgccgcatagttaagccagtatctgctccctgcttgtgtgttggaggtcgctgagtagtgcgcgagcaaaatttaagctacaacaaggcaaggcttgaccgacaattgcatgaagaatctgcttagggttaggcgttttgcgctgcttcgcgatgtacgggccagatatacgcgttgacattgattattgactagttattaatagtaatcaattacggggtcattagttcatagcccatatatggagttccgcgttacataacttacggtaaatggcccgcctggctgaccgcccaacgacccccgcccattgacgtcaataatgacgtatgttcccatagtaacgccaatagggactttccattgacgtcaatgggtggactatttacggtaaactgcccacttggcagtacatcaagtgtatcatatgccaagtacgccccctattgacgtcaatgacggtaaatggcccgcctggcattatgcccagtacatgaccttatgggactttcctacttggcagtacatctacgtattagtcatcgctattaccatggtgatgcggttttggcagtacatcaatgggcgtggatagcggtttgactcacggggatttccaagtctccaccccattgacgtcaatgggagtttgttttggcaccaaaatcaacgggactttccaaaatgtcgtaacaactccgccccattgacgcaaatgggcggtaggcgtgtacggtgggaggtctatataagcagagctctctggctaactagagaacccactgcttactggcttatcgaaattaatacgactcactatagggagacccaagctggctagcgccaccatgaaaattattcttttcttggcactgataacactcgctacttgtgagctttatcactaccaagagtgtgttagaggtacaacagtacttttaaaagaaccttgctcttctggaacatacgagggcaattcaccatttcatcctctagctgataacaaatttgcactgacttgctttagcactcaatttgcttttgcttgtcctgacggcgtaaaacacgtctatcagttacgtgccagatcagtttcacctaaactgttcatcagacaagaggaagttcaagaactttactctccaatttttcttattgttgcggcaatagtgtttataacactttgcttcacactcaaaagaaagacagaatgactcgagtctagagggcccgtttaaacccgctgatcagcctcgactgtgccttctagttgccagccatctgttgtttgcccctcccccgtgccttccttgaccctggaaggtgccactcccactgtcctttcctaataaaatgaggaaattgcatcgcattgtctgagtaggtgtcattctattctggggggtggggtggggcaggacagcaagggggaggattgggaagacaatagcaggcatgctggggatgcggtgggctctatggcttctgaggcggaaagaaccagctggggctctagggggtatccccacgcgccctgtagcggcgcattaagcgcggcgggtgtggtggttacgcgcagcgtgaccgctacacttgccagcgccctagcgcccgctcctttcgctttcttcccttcctttctcgccacgttcgccggctttccccgtcaagctctaaatcggggcatccctttagggttccgatttagtgctttacggcacctcgaccccaaaaaacttgattagggtgatggttcacgtagtgggccatcgccctgatagacggtttttcgccctttgacgttggagtccacgttctttaatagtggactcttgttccaaactggaacaacactcaaccctatctcggtctattcttttgatttataagggattttggggatttcggcctattggttaaaaaatgagctgatttaacaaaaatttaacgcgaattaattctgtggaatgtgtgtcagttagggtgtggaaagtccccaggctccccaggcaggcagaagtatgcaaagcatgcatctcaattagtcagcaaccaggtgtggaaagtccccaggctccccagcaggcagaagtatgcaaagcatgcatctcaattagtcagcaaccatagtcccgcccctaactccgcccatcccgcccctaactccgcccagttccgcccattctccgccccatggctgactaattttttttatttatgcagaggccgaggccgcctctgcctctgagctattccagaagtagtgaggaggcttttttggaggcctaggcttttgcaaaaagctcccgggagcttgtatatccattttcggatctgatcagcacgtgatgaaaaagcctgaactcaccgcgacgtctgtcgagaagtttctgatcgaaaagttcgacagcgtctccgacctgatgcagctctcggagggcgaagaatctcgtgctttcagcttcgatgtaggagggcgtggatatgtcctgcgggtaaatagctgcgccgatggtttctacaaagatcgttatgtttatcggcactttgcatcggccgcgctcccgattccggaagtgcttgacattggggaattcagcgagagcctgacctattgcatctcccgccgtgcacagggtgtcacgttgcaagacctgcctgaaaccgaactgcccgctgttctgcagccggtcgcggaggccatggatgcgatcgctgcggccgatcttagccagacgagcgggttcggcccattcggaccgcaaggaatcggtcaatacactacatggcgtgatttcatatgcgcgattgctgatccccatgtgtatcactggcaaactgtgatggacgacaccgtcagtgcgtccgtcgcgcaggctctcgatgagctgatgctttgggccgaggactgccccgaagtccggcacctcgtgcacgcggatttcggctccaacaatgtcctgacggacaatggccgcataacagcggtcattgactggagcgaggcgatgttcggggattcccaatacgaggtcgccaacatcttcttctggaggccgtggttggcttgtatggagcagcagacgcgctacttcgagcggaggcatccggagcttgcaggatcgccgcggctccgggcgtatatgctccgcattggtcttgaccaactctatcagagcttggttgacggcaatttcgatgatgcagcttgggcgcagggtcgatgcgacgcaatcgtccgatccggagccgggactgtcgggcgtacacaaatcgcccgcagaagcgcggccgtctggaccgatggctgtgtagaagtactcgccgatagtggaaaccgacgccccagcactcgtccgagggcaaaggaatagcacgtgctacgagatttcgattccaccgccgccttctatgaaaggttgggcttcggaatcgttttccgggacgccggctggatgatcctccagcgcggggatctcatgctggagttcttcgcccaccccaacttgtttattgcagcttataatggttacaaataaagcaatagcatcacaaatttcacaaataaagcatttttttcactgcattctagttgtggtttgtccaaactcatcaatgtatcttatcatgtctgtataccgtcgacctctagctagagcttggcgtaatcatggtcatagctgtttcctgtgtgaaattgttatccgctcacaattccacacaacatacgagccggaagcataaagtgtaaagcctggggtgcctaatgagtgagctaactcacattaattgcgttgcgctcactgcccgctttccagtcgggaaacctgtcgtgccagctgcattaatgaatcggccaacgcgcggggagaggcggtttgcgtattgggcgctcttccgcttcctcgctcactgactcgctgcgctcggtcgttcggctgcggcgagcggtatcagctcactcaaaggcggtaatacggttatccacagaatcaggggataacgcaggaaagaacatgtgagcaaaaggccagcaaaaggccaggaaccgtaaaaaggccgcgttgctggcgtttttccataggctccgcccccctgacgagcatcacaaaaatcgacgctcaagtcagaggtggcgaaacccgacaggactataaagataccaggcgtttccccctggaagctccctcgtgcgctctcctgttccgaccctgccgcttaccggatacctgtccgcctttctcccttcgggaagcgtggcgctttctcaatgctcacgctgtaggtatctcagttcggtgtaggtcgttcgctccaagctgggctgtgtgcacgaaccccccgttcagcccgaccgctgcgccttatccggtaactatcgtcttgagtccaacccggtaagacacgacttatcgccactggcagcagccactggtaacaggattagcagagcgaggtatgtaggcggtgctacagagttcttgaagtggtggcctaactacggctacactagaaggacagtatttggtatctgcgctctgctgaagccagttaccttcggaaaaagagttggtagctcttgatccggcaaacaaaccaccgctggtagcggtggtttttttgtttgcaagcagcagattacgcgcagaaaaaaaggatctcaagaagatcctttgatcttttctacggggtctgacgctcagtggaacgaaaactcacgttaagggattttggtcatgagattatcaaaaaggatcttcacctagatccttttaaattaaaaatgaagttttaaatcaatctaaagtatatatgagtaaacttggtctgacagttaccaatgcttaatcagtgaggcacctatctcagcgatctgtctatttcgttcatccatagttgcctgactccccgtcgtgtagataactacgatacgggagggcttaccatctggccccagtgctgcaatgataccgcgagacccacgctcaccggctccagatttatcagcaataaaccagccagccggaagggccgagcgcagaagtggtcctgcaactttatccgcctccatccagtctattaattgttgccgggaagctagagtaagtagttcgccagttaatagtttgcgcaacgttgttgccattgctacaggcatcgtggtgtcacgctcgtcgtttggtatggcttcattcagctccggttcccaacgatcaaggcgagttacatgatcccccatgttgtgcaaaaaagcggttagctccttcggtcctccgatcgttgtcagaagtaagttggccgcagtgttatcactcatggttatggcagcactgcataattctcttactgtcatgccatccgtaagatgcttttctgtgactggtgagtactcaaccaagtcattctgagaatagtgtatgcggcgaccgagttgctcttgcccggcgtcaatacgggataataccgcgccacatagcagaactttaaaagtgctcatcattggaaaacgttcttcggggcgaaaactctcaaggatcttaccgctgttgagatccagttcgatgtaacccactcgtgcacccaactgatcttcagcatcttttactttcaccagcgtttctgggtgagcaaaaacaggaaggcaaaatgccgcaaaaaagggaataagggcgacacggaaatgttgaatactcatactcttcctttttcaatattattgaagcatttatcagggttattgtctcatgagcggatacatatttgaatgtatttagaaaaataaacaaataggggttccgcgcacatttccccgaaaagtgccacctgacgtc

SEQ ID NO: 30 - DNA, 5889 bp, synthetic construct
  misc_feature 1..5889: note = pcDNA3.1/Hygro(+)_ORF8
  source 1..5889: mol_type = other DNA
gacggatcgggagatctcccgatcccctatggtcgactctcagtacaatctgctctgatgccgcatagttaagccagtatctgctccctgcttgtgtgttggaggtcgctgagtagtgcgcgagcaaaatttaagctacaacaaggcaaggcttgaccgacaattgcatgaagaatctgcttagggttaggcgttttgcgctgcttcgcgatgtacgggccagatatacgcgttgacattgattattgactagttattaatagtaatcaattacggggtcattagttcatagcccatatatggagttccgcgttacataacttacggtaaatggcccgcctggctgaccgcccaacgacccccgcccattgacgtcaataatgacgtatgttcccatagtaacgccaatagggactttccattgacgtcaatgggtggactatttacggtaaactgcccacttggcagtacatcaagtgtatcatatgccaagtacgccccctattgacgtcaatgacggtaaatggcccgcctggcattatgcccagtacatgaccttatgggactttcctacttggcagtacatctacgtattagtcatcgctattaccatggtgatgcggttttggcagtacatcaatgggcgtggatagcggtttgactcacggggatttccaagtctccaccccattgacgtcaatgggagtttgttttggcaccaaaatcaacgggactttccaaaatgtcgtaacaactccgccccattgacgcaaatgggcggtaggcgtgtacggtgggaggtctatataagcagagctctctggctaactagagaacccactgcttactggcttatcgaaattaatacgactcactatagggagacccaagctggctagcgccaccatgaaatttcttgttttcttaggaatcatcacaactgtagctgcatttcaccaagaatgtagtttacagtcatgtactcaacatcaaccatatgtagttgatgacccgtgtcctattcacttctattctaaatggtatattagagtaggagctagaaaatcagcacctttaattgaattgtgcgtggatgaggctggttctaaatcacccattcagtacatcgatatcggtaattatacagtttcctgtttaccttttacaattaattgccaggaacctaaattgggtagtcttgtagtgcgttgttcgttctatgaagactttttagagtatcatgacgttcgtgttgttttagatttcatctaactcgagtctagagggcccgtttaaacccgctgatcagcctcgactgtgccttctagttgccagccatctgttgtttgcccctcccccgtgccttccttgaccctggaaggtgccactcccactgtcctttcctaataaaatgaggaaattgcatcgcattgtctgagtaggtgtcattctattctggggggtggggtggggcaggacagcaagggggaggattgggaagacaatagcaggcatgctggggatgcggtgggctctatggcttctgaggcggaaagaaccagctggggctctagggggtatccccacgcgccctgtagcggcgcattaagcgcggcgggtgtggtggttacgcgcagcgtgaccgctacacttgccagcgccctagcgcccgctcctttcgctttcttcccttcctttctcgccacgttcgccggctttccccgtcaagctctaaatcggggcatccctttagggttccgatttagtgctttacggcacctcgaccccaaaaaacttgattagggtgatggttcacgtagtgggccatcgccctgatagacggtttttcgccctttgacgttggagtccacgttctttaatagtggactcttgttccaaactggaacaacactcaaccctatctcggtctattcttttgatttataagggattttggggatttcggcctattggttaaaaaatgagctgatttaacaaaaatttaacgcgaattaattctgtggaatgtgtgtcagttagggtgtggaaagtccccaggctccccaggcaggcagaagtatgcaaagcatgcatctcaattagtcagcaaccaggtgtggaaagtccccaggctccccagcaggcagaagtatgcaaagcatgcatctcaattagtcagcaaccatagtcccgcccctaactccgcccatcccgcccctaactccgcccagttccgcccattctccgccccatggctgactaattttttttatttatgcagaggccgaggccgcctctgcctctgagctattccagaagtagtgaggaggcttttttggaggcctaggcttttgcaaaaagctcccgggagcttgtatatccattttcggatctgatcagcacgtgatgaaaaagcctgaactcaccgcgacgtctgtcgagaagtttctgatcgaaaagttcgacagcgtctccgacctgatgcagctctcggagggcgaagaatctcgtgctttcagcttcgatgtaggagggcgtggatatgtcctgcgggtaaatagctgcgccgatggtttctacaaagatcgttatgtttatcggcactttgcatcggccgcgctcccgattccggaagtgcttgacattggggaattcagcgagagcctgacctattgcatctcccgccgtgcacagggtgtcacgttgcaagacctgcctgaaaccgaactgcccgctgttctgcagccggtcgcggaggccatggatgcgatcgctgcggccgatcttagccagacgagcgggttcggcccattcggaccgcaaggaatcggtcaatacactacatggcgtgatttcatatgcgcgattgctgatccccatgtgtatcactggcaaactgtgatggacgacaccgtcagtgcgtccgtcgcgcaggctctcgatgagctgatgctttgggccgaggactgccccgaagtccggcacctcgtgcacgcggatttcggctccaacaatgtcctgacggacaatggccgcataacagcggtcattgactggagcgaggcgatgttcggggattcccaatacgaggtcgccaacatcttcttctggaggccgtggttggcttgtatggagcagcagacgcgctacttcgagcggaggcatccggagcttgcaggatcgccgcggctccgggcgtatatgctccgcattggtcttgaccaactctatcagagcttggttgacggcaatttcgatgatgcagcttgggcgcagggtcgatgcgacgcaatcgtccgatccggagccgggactgtcgggcgtacacaaatcgcccgcagaagcgcggccgtctggaccgatggctgtgtagaagtactcgccgatagtggaaaccgacgccccagcactcgtccgagggcaaaggaatagcacgtgctacgagatttcgattccaccgccgccttctatgaaaggttgggcttcggaatcgttttccgggacgccggctggatgatcctccagcgcggggatctcatgctggagttcttcgcccaccccaacttgtttattgcagcttataatggttacaaataaagcaatagcatcacaaatttcacaaataaagcatttttttcactgcattctagttgtggtttgtccaaactcatcaatgtatcttatcatgtctgtataccgtcgacctctagctagagcttggcgtaatcatggtcatagctgtttcctgtgtgaaattgttatccgctcacaattccacacaacatacgagccggaagcataaagtgtaaagcctggggtgcctaatgagtgagctaactcacattaattgcgttgcgctcactgcccgctttccagtcgggaaacctgtcgtgccagctgcattaatgaatcggccaacgcgcggggagaggcggtttgcgtattgggcgctcttccgcttcctcgctcactgactcgctgcgctcggtcgttcggctgcggcgagcggtatcagctcactcaaaggcggtaatacggttatccacagaatcaggggataacgcaggaaagaacatgtgagcaaaaggccagcaaaaggccaggaaccgtaaaaaggccgcgttgctggcgtttttccataggctccgcccccctgacgagcatcacaaaaatcgacgctcaagtcagaggtggcgaaacccgacaggactataaagataccaggcgtttccccctggaagctccctcgtgcgctctcctgttccgaccctgccgcttaccggatacctgtccgcctttctcccttcgggaagcgtggcgctttctcaatgctcacgctgtaggtatctcagttcggtgtaggtcgttcgctccaagctgggctgtgtgcacgaaccccccgttcagcccgaccgctgcgccttatccggtaactatcgtcttgagtccaacccggtaagacacgacttatcgccactggcagcagccactggtaacaggattagcagagcgaggtatgtaggcggtgctacagagttcttgaagtggtggcctaactacggctacactagaaggacagtatttggtatctgcgctctgctgaagccagttaccttcggaaaaagagttggtagctcttgatccggcaaacaaaccaccgctggtagcggtggtttttttgtttgcaagcagcagattacgcgcagaaaaaaaggatctcaagaagatcctttgatcttttctacggggtctgacgctcagtggaacgaaaactcacgttaagggattttggtcatgagattatcaaaaaggatcttcacctagatccttttaaattaaaaatgaagttttaaatcaatctaaagtatatatgagtaaacttggtctgacagttaccaatgcttaatcagtgaggcacctatctcagcgatctgtctatttcgttcatccatagttgcctgactccccgtcgtgtagataactacgatacgggagggcttaccatctggccccagtgctgcaatgataccgcgagacccacgctcaccggctccagatttatcagcaataaaccagccagccggaagggccgagcgcagaagtggtcctgcaactttatccgcctccatccagtctattaattgttgccgggaagctagagtaagtagttcgccagttaatagtttgcgcaacgttgttgccattgctacaggcatcgtggtgtcacgctcgtcgtttggtatggcttcattcagctccggttcccaacgatcaaggcgagttacatgatcccccatgttgtgcaaaaaagcggttagctccttcggtcctccgatcgttgtcagaagtaagttggccgcagtgttatcactcatggttatggcagcactgcataattctcttactgtcatgccatccgtaagatgcttttctgtgactggtgagtactcaaccaagtcattctgagaatagtgtatgcggcgaccgagttgctcttgcccggcgtcaatacgggataataccgcgccacatagcagaactttaaaagtgctcatcattggaaaacgttcttcggggcgaaaactctcaaggatcttaccgctgttgagatccagttcgatgtaacccactcgtgcacccaactgatcttcagcatcttttactttcaccagcgtttctgggtgagcaaaaacaggaaggcaaaatgccgcaaaaaagggaataagggcgacacggaaatgttgaatactcatactcttcctttttcaatattattgaagcatttatcagggttattgtctcatgagcggatacatatttgaatgtatttagaaaaataaacaaataggggttccgcgcacatttccccgaaaagtgccacctgacgtc

SEQ ID NO: 31 - DNA, 6731 bp, synthetic construct
  misc_feature 1..6731: note = pcDNA3.1/Hygro(+)_N
  source 1..6731: mol_type = other DNA
gacggatcgggagatctcccgatcccctatggtgcactctcagtacaatctgctctgatgccgcatagttaagccagtatctgctccctgcttgtgtgttggaggtcgctgagtagtgcgcgagcaaaatttaagctacaacaaggcaaggcttgaccgacaattgcatgaagaatctgcttagggttaggcgttttgcgctgcttcgcgatgtacgggccagatatacgcgttgacattgattattgactagttattaatagtaatcaattacggggtcattagttcatagcccatatatggagttccgcgttacataacttacggtaaatggcccgcctggctgaccgcccaacgacccccgcccattgacgtcaataatgacgtatgttcccatagtaacgccaatagggactttccattgacgtcaatgggtggagtatttacggtaaactgcccacttggcagtacatcaagtgtatcatatgccaagtacgccccctattgacgtcaatgacggtaaatggcccgcctggcattatgcccagtacatgaccttatgggactttcctacttggcagtacatctacgtattagtcatcgctattaccatggtgatgcggttttggcagtacatcaatgggcgtggatagcggtttgactcacggggatttccaagtctccaccccattgacgtcaatgggagtttgttttggcaccaaaatcaacgggactttccaaaatgtcgtaacaactccgccccattgacgcaaatgggcggtaggcgtgtacggtgggaggtctatataagcagagctctctggctaactagagaacccactgcttactggcttatcgaaattaatacgactcactatagggagacatgtctgttaatggaccccaaaatcagcgaaatgcaccccgcattacgtttggtggaccctcagattcaactggcagtaaccagaatggagaacgcagtggggcgcgatcaaaacaacgtcggccccaaggtttacccaataatactgcgtcttggttcaccgctctcactcaacatggcaaggaagaccttaaattccctcgaggacaaggcgttccaattaacaccaatagcagtccagatgaccaaattggctactaccgaagagctaccagacgaattcgtggtggtgacggtaaaatgaaagatctcagtccaagatggtatttctactacctaggaactgggccagaagctggacttccctatggtgctaacaaagacggcatcatatgggttgcaactgagggagccttgaatacaccaaaagatcacattggcacccgcaatcctgctaacaatgctgcaatcgtgctacaacttcctcaaggaacaacattgccaaaaggcttctacgcagaagggagcagaggcggcagtcaagcctcttctcgttcctcatcacgtagtcgcaacagttcaagaaattcaactccaggcagcagtaggggaacttctcctgctagaatggctggcaatggcggtgatgctgctcttgctttgctgctgcttgacagattgaaccagcttgagagcaaaatgtctggtaaaggccaacaacaacaaggccaaactgtcactaagaaatctgctgctgaggcttctaagaagcctcggcaaaaacgtactgccactaaagcatacaatgtaacacaagctttcggcagacgtggtccagaacaaacccaaggaaattttggggaccaggaactaatcagacaaggaactgattacaaacattggccgcaaattgcacaatttgcccccagcgcttcagcgttcttcggaatgtcgcgcattggcatggaagtcacaccttcgggaacgtggttgacctacacaggtgccatcaaattggatgacaaagatccaaatttcaaagatcaagtcattttgctgaataagcatattgacgcatacaaaacattcccaccaacagagcctaaaaaggacaaaaagaagaaggctgatgaaactcaagccttaccgcagagacagaagaaacagcaaactgtgactcttcttcctgctgcagatttggatgatttctccaaacaattgcaacaatccatgagcagtgctgactcaactcaggcctaagctgatcagcctcgactgtgccttctagttgccagccatctgttgtttgcccctcccccgtgccttccttgaccctggaaggtgccactcccactgtcctttcctaataaaatgaggaaattgcatcgcattgtctgagtaggtgtcattctattctggggggtggggtggggcaggacagcaagggggaggattgggaagacaatagcaggcatgctggggatgcggtgggctctatggcttctgaggcggaaagaaccagctggggctctagggggtatccccacgcgccctgtagcggcgcattaagcgcggcgggtgtggtggttacgcgcagcgtgaccgctacacttgccagcgccctagcgcccgctcctttcgctttcttcccttcctttctcgccacgttcgccggctttccccgtcaagctctaaatcgggggctccctttagggttccgatttagtgctttacggcacctcgaccccaaaaaacttgattagggtgatggttcacgtagtgggccatcgccctgatagacggtttttcgccctttgacgttggagtccacgttctttaatagtggactcttgttccaaactggaacaacactcaaccctatctcggtctattcttttgatttataagggattttgccgatttcggcctattggttaaaaaatgagctgatttaacaaaaatttaacgcgaattaattctgtggaatgtgtgtcagttagggtgtggaaagtccccaggctccccagcaggcagaagtatgcaaagcatgcatctcaattagtcagcaaccaggtgtggaaagtccccaggctccccagcaggcagaagtatgcaaagcatgcatctcaattagtcagcaaccatagtcccgcccctaactccgcccatcccgcccctaactccgcccagttccgcccattctccgccccatggctgactaattttttttatttatgcagaggccgaggccgcctctgcctctgagctattccagaagtagtgaggaggcttttttggaggcctaggcttttgcaaaaagctcccgggagcttgtatatccattttcggatctgatcagcacgtgatgaaaaagcctgaactcaccgcgacgtctgtcgagaagtttctgatcgaaaagttcgacagcgtctccgacctgatgcagctctcggagggcgaagaatctcgtgctttcagcttcgatgtaggagggcgtggatatgtcctgcgggtaaatagctgcgccgatggtttctacaaagatcgttatgtttatcggcactttgcatcggccgcgctcccgattccggaagtgcttgacattggggaattcagcgagagcctgacctattgcatctcccgccgtgcacagggtgtcacgttgcaagacctgcctgaaaccgaactgcccgctgttctgcagccggtcgcggaggccatggatgcgatcgctgcggccgatcttagccagacgagcgggttcggcccattcggaccgcaaggaatcggtcaatacactacatggcgtgatttcatatgcgcgattgctgatccccatgtgtatcactggcaaactgtgatggacgacaccgtcagtgcgtccgtcgcgcaggctctcgatgagctgatgctttgggccgaggactgccccgaagtccggcacctcgtgcacgcggatttcggctccaacaatgtcctgacggacaatggccgcataacagcggtcattgactggagcgaggcgatgttcggggattcccaatacgaggtcgccaacatcttcttctggaggccgtggttggcttgtatggagcagcagacgcgctacttcgagcggaggcatccggagcttgcaggatcgccgcggctccgggcgtatatgctccgcattggtcttgaccaactctatcagagcttggttgacggcaatttcgatgatgcagcttgggcgcagggtcgatgcgacgcaatcgtccgatccggagccgggactgtcgggcgtacacaaatcgcccgcagaagcgcggccgtctggaccgatggctgtgtagaagtactcgccgatagtggaaaccgacgccccagcactcgtccgagggcaaaggaatagcacgtgctacgagatttcgattccaccgccgccttctatgaaaggttgggcttcggaatcgttttccgggacgccggctggatgatcctccagcgcggggatctcatgctggagttcttcgcccaccccaacttgtttattgcagcttataatggttacaaataaagcaatagcatcacaaatttcacaaataaagcatttttttcactgcattctagttgtggtttgtccaaactcatcaatgtatcttatcatgtctgtataccgtcgacctctagctagagcttggcgtaatcatggtcatagctgtttcctgtgtgaaattgttatccgctcacaattccacacaacatacgagccggaagcataaagtgtaaagcctggggtgcctaatgagtgagctaactcacattaattgcgttgcgctcactgcccgctttccagtcgggaaacctgtcgtgccagctgcattaatgaatcggccaacgcgcggggagaggcggtttgcgtattgggcgctcttccgcttcctcgctcactgactcgctgcgctcggtcgttcggctgcggcgagcggtatcagctcactcaaaggcggtaatacggttatccacagaatcaggggataacgcaggaaagaacatgtgagcaaaaggccagcaaaaggccaggaaccgtaaaaaggccgcgttgctggcgtttttccataggctccgcccccctgacgagcatcacaaaaatcgacgctcaagtcagaggtggcgaaacccgacaggactataaagataccaggcgtttccccctggaagctccctcgtgcgctctcctgttccgaccctgccgcttaccggatacctgtccgcctttctcccttcgggaagcgtggcgctttctcatagctcacgctgtaggtatctcagttcggtgtaggtcgttcgctccaagctgggctgtgtgcacgaaccccccgttcagcccgaccgctgcgccttatccggtaactatcgtcttgagtccaacccggtaagacacgacttatcgccactggcagcagccactggtaacaggattagcagagcgaggtatgtaggcggtgctacagagttcttgaagtggtggcctaactacggctacactagaagaacagtatttggtatctgcgctctgctgaagccagttaccttcggaaaaagagttggtagctcttgatccggcaaacaaaccaccgctggtagcggtttttttgtttgcaagcagcagattacgcgcagaaaaaaaggatctcaagaagatcctttgatcttttctacggggtctgacgctcagtggaacgaaaactcacgttaagggattttggtcatgagattatcaaaaaggatcttcacctagatccttttaaattaaaaatgaagttttaaatcaatctaaagtatatatgagtaaacttggtctgacagttaccaatgcttaatcagtgaggcacctatctcagcgatctgtctatttcgttcatccatagttgcctgactccccgtcgtgtagataactacgatacgggagggcttaccatctggccccagtgctgcaatgataccgcgagacccacgctcaccggctccagatttatcagcaataaaccagccagccggaagggccgagcgcagaagtggtcctgcaactttatccgcctccatccagtctattaattgttgccgggaagctagagtaagtagttcgccagttaatagtttgcgcaacgttgttgccattgctacaggcatcgtggtgtcacgctcgtcgtttggtatggcttcattcagctccggttcccaacgatcaaggcgagttacatgatcccccatgttgtgcaaaaaagcggttagctccttcggtcctccgatcgttgtcagaagtaagttggccgcagtgttatcactcatggttatggcagcactgcataattctcttactgtcatgccatccgtaagatgcttttctgtgactggtgagtactcaaccaagtcattctgagaatagtgtatgcggcgaccgagttgctcttgcccggcgtcaatacgggataataccgcgccacatagcagaactttaaaagtgctcatcattggaaaacgttcttcggggcgaaaactctcaaggatcttaccgctgttgagatccagttcgatgtaacccactcgtgcacccaactgatcttcagcatcttttactttcaccagcgtttctgggtgagcaaaaacaggaaggcaaaatgccgcaaaaaagggaataagggcgacacggaaatgttgaatactcatactcttcctttttcaatattattgaagcatttatcagggttattgtctcatgagcggatacatatttgaatgtatttagaaaaataaacaaataggggttccgcgcacatttccccgaaaagtgccacctgacgtc

SEQ ID NO: 32 - DNA, 6299 bp, synthetic construct
  misc_feature 1..6299: note = pcDNA3.1/Hygro(+)_ORF3a
  source 1..6299: mol_type = other DNA
gacggatcgggagatctcccgatcccctatggtgcactctcagtacaatctgctctgatgccgcatagttaagccagtatctgctccctgcttgtgtgttggaggtcgctgagtagtgcgcgagcaaaatttaagctacaacaaggcaaggcttgaccgacaattgcatgaagaatctgcttagggttaggcgttttgcgctgcttcgcgatgtacgggccagatatacgcgttgacattgattattgactagttattaatagtaatcaattacggggtcattagttcatagcccatatatggagttccgcgttacataacttacggtaaatggcccgcctggctgaccgcccaacgacccccgcccattgacgtcaataatgacgtatgttcccatagtaacgccaatagggactttccattgacgtcaatgggtggagtatttacggtaaactgcccacttggcagtacatcaagtgtatcatatgccaagtacgccccctattgacgtcaatgacggtaaatggcccgcctggcattatgcccagtacatgaccttatgggactttcctacttggcagtacatctacgtattagtcatcgctattaccatggtgatgcggttttggcagtacatcaatgggcgtggatagcggtttgactcacggggatttccaagtctccaccccattgacgtcaatgggagtttgttttggcaccaaaatcaacgggactttccaaaatgtcgtaacaactccgccccattgacgcaaatgggcggtaggcgtgtacggtgggaggtctatataagcagagctctctggctaactagagaacccactgcttactggcttatcgaaattaatacgactcactatagggagacatggatttgtttatgagaatcttcacaattggaactgtaactttgaagcaaggtgaaatcaaggatgctactccttcagattttgttcgcgctactgcaacgataccgatacaagcctcactccctttcggatggcttattgttggcgttgcacttcttgctgtttttcagagcgcttccaaaatcataaccctcaaaaagagatggcaactagcactctccaagggtgttcactttgtttgcaacttgctgttgttgtttgtaacagtttactcacaccttttgctcgttgctgctggccttgaagccccttttctctatctttatgctttagtctacttcttgcagagtataaactttgtaagaataataatgaggctttggctttgctggaaatgccgttccaaaaacccattactttatgatgccaactattttctttgctggcatactaattgttacgactattgtataccttacaatagtgtaacttcttcaattgtcattacttcaggtgatggcacaacaagtcctatttctgaacatgactaccagattggtggttatactgaaaaatgggaatctggagtaaaagactgtgttgtattacacagttacttcacttcagactattaccagctgtactcaactcaattgagtacagacactggtgttgaacatgttaccttcttcatctacaataaaattgttgatgagcctgaagaacatgtccaaattcacacaatcgacggttcatccggagttgttaatccagtaatggaaccaatttatgatgaaccgacgacgactactagcgtgcctttgtaagctgatcagcctcgactgtgccttctagttgccagccatctgttgtttgcccctcccccgtgccttccttgaccctggaaggtgccactcccactgtcctttcctaataaaatgaggaaattgcatcgcattgtctgagtaggtgtcattctattctggggggtggggtggggcaggacagcaagggggaggattgggaagacaatagcaggcatgctggggatgcggtgggctctatggcttctgaggcggaaagaaccagctggggctctagggggtatccccacgcgccctgtagcggcgcattaagcgcggcgggtgtggtggttacgcgcagcgtgaccgctacacttgccagcgccctagcgcccgctcctttcgctttcttcccttcctttctcgccacgttcgccggctttccccgtcaagctctaaatcgggggctccctttagggttccgatttagtgctttacggcacctcgaccccaaaaaacttgattagggtgatggttcacgtagtgggccatcgccctgatagacggtttttcgccctttgacgttggagtccacgttctttaatagtggactcttgttccaaactggaacaacactcaaccctatctcggtctattcttttgatttataagggattttgccgatttcggcctattggttaaaaaatgagctgatttaacaaaaatttaacgcgaattaattctgtggaatgtgtgtcagttagggtgtggaaagtccccaggctccccagcaggcagaagtatgcaaagcatgcatctcaattagtcagcaaccaggtgtggaaagtccccaggctccccagcaggcagaagtatgcaaagcatgcatctcaattagtcagcaaccatagtcccgcccctaactccgcccatcccgcccctaactccgcccagttccgcccattctccgccccatggctgactaattttttttatttatgcagaggccgaggccgcctctgcctctgagctattccagaagtagtgaggaggcttttttggaggcctaggcttttgcaaaaagctcccgggagcttgtatatccattttcggatctgatcagcacgtgatgaaaaagcctgaactcaccgcgacgtctgtcgagaagtttctgatcgaaaagttcgacagcgtctccgacctgatgcagctctcggagggcgaagaatctcgtgctttcagcttcgatgtaggagggcgtggatatgtcctgcgggtaaatagctgcgccgatggtttctacaaagatcgttatgtttatcggcactttgcatcggccgcgctcccgattccggaagtgcttgacattggggaattcagcgagagcctgacctattgcatctcccgccgtgcacagggtgtcacgttgcaagacctgcctgaaaccgaactgcccgctgttctgcagccggtcgcggaggccatggatgcgatcgctgcggccgatcttagccagacgagcgggttcggcccattcggaccgcaaggaatcggtcaatacactacatggcgtgatttcatatgcgcgattgctgatccccatgtgtatcactggcaaactgtgatggacgacaccgtcagtgcgtccgtcgcgcaggctctcgatgagctgatgctttgggccgaggactgccccgaagtccggcacctcgtgcacgcggatttcggctccaacaatgtcctgacggacaatggccgcataacagcggtcattgactggagcgaggcgatgttcggggattcccaatacgaggtcgccaacatcttcttctggaggccgtggttggcttgtatggagcagcagacgcgctacttcgagcggaggcatccggagcttgcaggatcgccgcggctccgggcgtatatgctccgcattggtcttgaccaactctatcagagcttggttgacggcaatttcgatgatgcagcttgggcgcagggtcgatgcgacgcaatcgtccgatccggagccgggactgtcgggcgtacacaaatcgcccgcagaagcgcggccgtctggaccgatggctgtgtagaagtactcgccgatagtggaaaccgacgccccagcactcgtccgagggcaaaggaatagcacgtgctacgagatttcgattccaccgccgccttctatgaaaggttgggcttcggaatcgttttccgggacgccggctggatgatcctccagcgcggggatctcatgctggagttcttcgcccaccccaacttgtttattgcagcttataatggttacaaataaagcaatagcatcacaaatttcacaaataaagcatttttttcactgcattctagttgtggtttgtccaaactcatcaatgtatcttatcatgtctgtataccgtcgacctctagctagagcttggcgtaatcatggtcatagctgtttcctgtgtgaaattgttatccgctcacaattccacacaacatacgagccggaagcataaagtgtaaagcctggggtgcctaatgagtgagctaactcacattaattgcgttgcgctcactgcccgctttccagtcgggaaacctgtcgtgccagctgcattaatgaatcggccaacgcgcggggagaggcggtttgcgtattgggcgctcttccgcttcctcgctcactgactcgctgcgctcggtcgttcggctgcggcgagcggtatcagctcactcaaaggcggtaatacggttatccacagaatcaggggataacgcaggaaagaacatgtgagcaaaaggccagcaaaaggccaggaaccgtaaaaaggccgcgttgctggcgtttttccataggctccgcccccctgacgagcatcacaaaaatcgacgctcaagtcagaggtggcgaaacccgacaggactataaagataccaggcgtttccccctggaagctccctcgtgcgctctcctgttccgaccctgccgcttaccggatacctgtccgcctttctcccttcgggaagcgtggcgctttctcatagctcacgctgtaggtatctcagttcggtgtaggtcgttcgctccaagctgggctgtgtgcacgaaccccccgttcagcccgaccgctgcgccttatccggtaactatcgtcttgagtccaacccggtaagacacgacttatcgccactggcagcagccactggtaacaggattagcagagcgaggtatgtaggcggtgctacagagttcttgaagtggtggcctaactacggctacactagaagaacagtatttggtatctgcgctctgctgaagccagttaccttcggaaaaagagttggtagctcttgatccggcaaacaaaccaccgctggtagcggtttttttgtttgcaagcagcagattacgcgcagaaaaaaaggatctcaagaagatcctttgatcttttctacggggtctgacgctcagtggaacgaaaactcacgttaagggattttggtcatgagattatcaaaaaggatcttcacctagatccttttaaattaaaaatgaagttttaaatcaatctaaagtatatatgagtaaacttggtctgacagttaccaatgcttaatcagtgaggcacctatctcagcgatctgtctatttcgttcatccatagttgcctgactccccgtcgtgtagataactacgatacgggagggcttaccatctggccccagtgctgcaatgataccgcgagacccacgctcaccggctccagatttatcagcaataaaccagccagccggaagggccgagcgcagaagtggtcctgcaactttatccgcctccatccagtctattaattgttgccgggaagctagagtaagtagttcgccagttaatagtttgcgcaacgttgttgccattgctacaggcatcgtggtgtcacgctcgtcgtttggtatggcttcattcagctccggttcccaacgatcaaggcgagttacatgatcccccatgttgtgcaaaaaagcggttagctccttcggtcctccgatcgttgtcagaagtaagttggccgcagtgttatcactcatggttatggcagcactgcataattctcttactgtcatgccatccgtaagatgcttttctgtgactggtgagtactcaaccaagtcattctgagaatagtgtatgcggcgaccgagttgctcttgcccggcgtcaatacgggataataccgcgccacatagcagaactttaaaagtgctcatcattggaaaacgttcttcggggcgaaaactctcaaggatcttaccgctgttgagatccagttcgatgtaacccactcgtgcacccaactgatcttcagcatcttttactttcaccagcgtttctgggtgagcaaaaacaggaaggcaaaatgccgcaaaaaagggaataagggcgacacggaaatgttgaatactcatactcttcctttttcaatattattgaagcatttatcagggttattgtctcatgagcggatacatatttgaatgtatttagaaaaataaacaaataggggttccgcgcacatttccccgaaaagtgccacctgacgtc

SEQ ID NO: 33 - DNA, 1374 bp, synthetic construct
  misc_feature 1..1374: note = delta M
  source 1..1374: mol_type = other DNA
gcacaagctgatgagtacgaacttatgtactcattcgtttcggaagagacaggtacgttaatagttaatagcgtacttctttttcttgctttcgtggtattcttgctagttacactagccatccttactgcgcttcgattgtgtgcgtactgctgcaatattgttaacgtgagtcttgtaaaaccttctttttacgtttactctcgtgttaaaaatctgaattcttctagagttcctgatcttccggtctaaacgaactaaatattatattagtttttctgtttggaactttaattttagccatgtttcatctcgttgactttcaggttactatagcagagatattactaattattatgaggacttttaaagtttccatttggaatcttgattacatcataaacctcataattaaaaatttatctaagtcactaactgagaataaatattctcaattagatgaagagcaaccaatggagattgattaaacgaacatgaaaattattcttttcttggcactgataacactcgctacttgtgagctttatcactaccaagagtgtgttagaggtacaacagtacttttaaaagaaccttgctcttctggaacatacgagggcaattcaccatttcatcctctagctgataacaaatttgcactgacttgctttagcactcaatttgcttttgcttgtcctgacggcgtaaaacacgtctatcagttacgtgccagatcagtttcacctaaactgttcatcagacaagaggaagttcaagaactttactctccaatttttcttattgttgcggcaatagtgtttataacactttgcttcacactcaaaagaaagacagaatgattgaactttcattaattgacttctatttgtgctttttagcctttctgctattccttgttttaattatgcttattatcttttggttctcacttgaactgcaagatcataatgaaacttgtcacgcctaaacgaacatgaaatttcttgttttcttaggaatcatcacaactgtagctgcatttcaccaagaatgtagtttacagtcatgtactcaacatcaaccatatgtagttgatgacccgtgtcctattcacttctattctaaatggtatattagagtaggagctagaaaatcagcacctttaattgaattgtgcgtggatgaggctggttctaaatcacccattcagtacatcgatatcggtaattatacagtttcctgtttaccttttacaattaattgccaggaacctaaattgggtagtcttgtagtgcgttgttcgttctatgaagactttttagagtatcatgacgttcgtgttgttttagatttcatctaaacgaacaaactaaa

SEQ ID NO: 34 - DNA, 1096 bp, synthetic construct
  misc_feature 1..1096: note = delta E delta M
  source 1..1096: mol_type = other DNA
gcacaagctgatgagtacgaacttatgtttcatctcgttgactttcaggttactatagcagagatattactaattattatgaggacttttaaagtttccatttggaatcttgattacatcataaacctcataattaaaaatttatctaagtcactaactgagaataaatattctcaattagatgaagagcaaccaatggagattgattaaacgaacatgaaaattattcttttcttggcactgataacactcgctacttgtgagctttatcactaccaagagtgtgttagaggtacaacagtacttttaaaagaaccttgctcttctggaacatacgagggcaattcaccatttcatcctctagctgataacaaatttgcactgacttgctttagcactcaatttgcttttgcttgtcctgacggcgtaaaacacgtctatcagttacgtgccagatcagtttcacctaaactgttcatcagacaagaggaagttcaagaactttactctccaatttttcttattgttgcggcaatagtgtttataacactttgcttcacactcaaaagaaagacagaatgattgaactttcattaattgacttctatttgtgctttttagcctttctgctattccttgttttaattatgcttattatcttttggttctcacttgaactgcaagatcataatgaaacttgtcacgcctaaacgaacatgaaatttcttgttttcttaggaatcatcacaactgtagctgcatttcaccaagaatgtagtttacagtcatgtactcaacatcaaccatatgtagttgatgacccgtgtcctattcacttctattctaaatggtatattagagtaggagctagaaaatcagcacctttaattgaattgtgcgtggatgaggctggttctaaatcacccattcagtacatcgatatcggtaattatacagtttcctgtttaccttttacaattaattgccaggaacctaaattgggtagtcttgtagtgcgttgttcgttctatgaagactttttagagtatcatgacgttcgtgttgttttagatttcatctaaacgaacaaactaaa

SEQ ID NO: 35 - DNA, 502 bp, synthetic construct
  misc_feature 1..502: note = delta M delta 7ab delta 8
  source 1..502: mol_type = other DNA
gcacaagctgatgagtacgaacttatgtactcattcgtttcggaagagacaggtacgttaatagttaatagcgtacttctttttcttgctttcgtggtattcttgctagttacactagccatccttactgcgcttcgattgtgtgcgtactgctgcaatattgttaacgtgagtcttgtaaaaccttctttttacgtttactctcgtgttaaaaatctgaattcttctagagttcctgatcttccggtctaaacgaactaaatattatattagtttttctgtttggaactttaattttagccatgtttcatctcgttgactttcaggttactatagcagagatattactaattattatgaggacttttaaagtttccatttggaatcttgattacatcataaacctcataattaaaaatttatctaagtcactaactgagaataaatattctcaattagatgaagagcaaccaatggagattgattaaacgaacaaactaaa

SEQ ID NO: 36 - DNA, 638 bp, synthetic construct
  misc_feature 1..638: note = delta M delta 6 delta 7ab
  source 1..638: mol_type = other DNA
gcacaagctgatgagtacgaacttatgtactcattcgtttcggaagagacaggtacgttaatagttaatagcgtacttctttttcttgctttcgtggtattcttgctagttacactagccatccttactgcgcttcgattgtgtgcgtactgctgcaatattgttaacgtgagtcttgtaaaaccttctttttacgtttactctcgtgttaaaaatctgaattcttctagagttcctgatcttccggtctaaacgaacatgaaatttcttgttttcttaggaatcatcacaactgtagctgcatttcaccaagaatgtagtttacagtcatgtactcaacatcaaccatatgtagttgatgacccgtgtcctattcacttctattctaaatggtatattagagtaggagctagaaaatcagcacctttaattgaattgtgcgtggatgaggctggttctaaatcacccattcagtacatcgatatcggtaattatacagtttcctgtttaccttttacaattaattgccaggaacctaaattgggtagtcttgtagtgcgttgttcgttctatgaagactttttagagtatcatgacgttcgtgttgttttagatttcatctaaacgaacaaactaaa

SEQ ID NO: 37 - DNA, 266 bp, synthetic construct
  misc_feature 1..266: note = delta M delta 6 delta 7ab delta 8
  source 1..266: mol_type = other DNA
gcacaagctgatgagtacgaacttatgtactcattcgtttcggaagagacaggtacgttaatagttaatagcgtacttctttttcttgctttcgtggtattcttgctagttacactagccatccttactgcgcttcgattgtgtgcgtactgctgcaatattgttaacgtgagtcttgtaaaaccttctttttacgtttactctcgtgttaaaaatctgaattcttctagagttcctgatcttccggtctaaacgaacaaactaaa

SEQ ID NO: 38 - DNA, 29706 bp, synthetic construct
  misc_feature 1..29706: note = Reconstituted virus 1
  source 1..29706: mol_type = other DNA
gtttataccttcctaggtaacaaaccaaccaactttcgatctcttgtagatctgttctctaaacgaactttaaaatctgtgtggctgtcactcggctgcatgcttagtgcactcacgcagtataattaataactaattactgtcgttgacaggacacgagtaactcgtctatcttctgcaggctgcttacggtttcgtccgtgttgcagccgatcatcagcacatctaggttttgtccgggtgtgaccgaaaggtaagatggagagccttgtccctggtttcaacgagaaaacacacgtccaactcagtttgcctgttttacaggttcgcgacgtgctcgtacgtggctttggagactccgtggaggaggtcttatcagaggcacgtcaacatcttaaagatggcacttgtggcttagtagaagttgaaaaaggcgttttgcctcaacttgaacagccctatgtgttcatcaaacgttcggatgctcgaactgcacctcatggtcatgttatggttgagctggtagcagaactcgaaggcattcagtacggtcgtagtggtgagacacttggtgtccttgtccctcatgtgggcgaaataccagtggcttaccgcaaggttcttcttcgtaagaacggtaataaaggagctggtggccatagttacggcgccgatctaaagtcatttgacttaggcgacgagcttggcactgatccttatgaagattttcaagaaaactggaacactaaacatagcagtggtgttacccgtgaactcatgcgtgagcttaacggaggggcatacactcgctatgtcgataacaacttctgtggccctgatggctaccctcttgagtgcattaaagaccttctagcacgtgctggtaaagcttcatgcactttgtccgaacaactggactttattgacactaagaggggtgtatactgctgccgtgaacatgagcatgaaattgcttggtacacggaacgttctgaaaagagctatgaattgcagacaccttttgaaattaaattggcaaagaaatttgacaccttcaatggggaatgtccaaattttgtatttcccttaaattccataatcaagactattcaaccaagggttgaaaagaaaaagcttgatggctttatgggtagaattcgatctgtctatccagttgcgtcaccaaatgaatgcaaccaaatgtgcctttcaactctcatgaagtgtgatcattgtggtgaaacttcatggcagacgggcgattttgttaaagccacttgcgaattttgtggcactgagaatttgactaaagaaggtgccactacttgtggttacttaccccaaaatgctgttgttaaaatttattgtccagcatgtcacaattcagaagtaggacctgagcatagtcttgccgaataccataatgaatctggcttgaaaaccattcttcgtaagggtggtcgcactattgcctttggaggctgtgtgttctcttatgttggttgccataacaagtgtgcctattgggttccacgtgctagcgctaacataggttgtaaccatacaggtgttgttggagaaggttccgaaggtcttaatgacaaccttcttgaaatactccaaaaagagaaagtcaacatcaatattgttggtgactttaaacttaatgaagagatcgccattattttggcatctttttctgcttccacaagtgcttttgtggaaactgtgaaaggtttggattataaagcattcaaacaaattgttgaatcctgtggtaattttaaagttacaaaaggaaaagctaaaaaaggtgcctggaatattggtgaacagaaatcaatactgagtcctctttatgcatttgcatcagaggctgctcgtgttgtacgatcaattttctcccgcactcttgaaactgctcaaaattctgtgcgtgttttacagaaggccgctataacaatactagatggaatttcacagtattcactgagactcattgatgctatgatgttcacatctgatttggctactaacaatctagttgtaatggcctacattacaggtggtgttgttcagttgacttcgcagtggctaactaacatctttggcactgtttatgaaaaactcaaacccgtccttgattggcttgaagagaagtttaaggaaggtgtagagtttcttagagacggttgggaaattgttaaatttatctcaacctgtgcttgtgaaattgtcggtggacaaattgtcacctgtgcaaaggaaattaaggagagtgttcagacattctttaagcttgtaaataaatttttggctttgtgtgctgactctatcattattggtggagctaaacttaaagccttgaatttaggtgaaacatttgtcacgcactcaaagggattgtacagaaagtgtgttaaatccagagaagaaactggcctactcatgcctctaaaagccccaaaagaaattatcttcttagagggagaaacacttcccacagaagtgttaacagaggaagttgtcttgaaaactggtgatttacaaccattagaacaacctactagtgaagctgttgaagctccattggttggtacaccagtttgtattaacgggcttatgttgctcgaaatcaaagacacagaaaagtactgtgcccttgcacctaatatgatggtaacaaacaataccttcacactcaaaggcggtgcaccaacaaaggttacttttggtgatgacactgtgatagaagtgcaaggttacaagagtgtgaatatcacttttgaacttgatgaaaggattgataaagtacttaatgagaagtgctctgcctatacagttgaactcggtacagaagtaaatgagttcgcctgtgttgtggcagatgctgtcataaaaactttgcaaccagtatctgaattacttacaccactgggcattgatttagatgagtggagtatggctacatactacttatttgatgagtctggtgagtttaaattggcttcacatatgtattgttctttttaccctccagatgaggatgaagaagaaggtgattgtgaagaagaagagtttgagccatcaactcaatatgagtatggtactgaagatgattaccaaggtaaacctttggaatttggtgccacttctgctgctcttcaacctgaagaagagcaagaagaagattggttagatgatgatagtcaacaaactgttggtcaacaagacggcagtgaggacaatcagacaactactattcaaacaattgttgaggttcaacctcaattagagatggaacttacaccagttgttcagactattgaagtgaatagttttagtggttatttaaaacttactgacaatgtatacattaaaaatgcagacattgtggaagaagctaaaaaggtaaaaccaacagtggttgttaatgcagccaatgtttaccttaaacatggaggaggtgttgcaggagccttaaataaggctactaacaatgccatgcaagttgaatctgatgattacatagctactaatggaccacttaaagtgggtggtagttgtgttttaagcggacacaatcttgctaaacactgtcttcatgttgtcggcccaaatgttaacaaaggtgaagacattcaacttcttaagagtgcttatgaaaattttaatcagcacgaagttctacttgcaccattattatcagctggtatttttggtgctgaccctatacattctttaagagtttgtgtagatactgttcgcacaaatgtctacttagctgtctttgataaaaatctctatgacaaacttgtttcaagctttttggaaatgaagagtgaaaagcaagttgaacaaaagatcgctgagattcctaaagaggaagttaagccatttataactgaaagtaaaccttcagttgaacagagaaaacaagatgataagaaaatcaaagcttgtgttgaagaagttacaacaactctggaagaaactaagttcctcacagaaaacttgttactttatattgacattaatggcaatcttcatccagattctgccactcttgttagtgacattgacatcactttcttaaagaaagatgctccatatatagtgggtgatgttgttcaagagggtgttttaactgctgtggttatacctactaaaaaggctggtggcactactgaaatgctagcgaaagctttgagaaaagtgccaacagacaattatataaccacttacccgggtcagggtttaaatggttacactgtagaggaggcaaagacagtgcttaaaaagtgtaaaagtgccttttacattctaccatctattatctctaatgagaagcaagaaattcttggaactgtttcttggaatttgcgagaaatgcttgcacatgcagaagaaacacgcaaattaatgcctgtctgtgtggaaactaaagccatagtttcaactatacagcgtaaatataagggtattaaaatacaagagggtgtggttgattatggtgctagattttacttttacaccagtaaaacaactgtagcgtcacttatcaacacacttaacgatctaaatgaaactcttgttacaatgccacttggctatgtaacacatggcttaaatttggaagaagctgctcggtatatgagatctctcaaagtgccagctacagtttctgtttcttcacctgatgctgttacagcgtataatggttatcttacttcttcttctaaaacacctgaagaacattttattgaaaccatctcacttgctggttcctataaagattggtcctattctggacaatctacacaactaggtatagaatttcttaagagaggtgataaaagtgtatattacactagtaatcctaccacattccacctagatggtgaagttatcacctttgacaatcttaagacacttctttctttgagagaagtgaggactattaaggtgtttacaacagtagacaacattaacctccacacgcaagttgtggacatgtcaatgacatatggacaacagtttggtccaacttatttggatggagctgatgttactaaaataaaacctcataattcacatgaaggtaaaacattttatgttttacctaatgatgacactctacgtgttgaggcttttgagtactaccacacaactgatcctagttttctgggtaggtacatgtcagcattaaatcacactaaaaagtggaaatacccacaagttaatggtttaacttctattaaatgggcagataacaactgttatcttgccactgcattgttaacactccaacaaatagagttgaagtttaatccacctgctctacaagatgcttattacagagcaagggctggtgaagctgctaacttttgtgcacttatcttagcctactgtaataagacagtaggtgagttaggtgatgttagagaaacaatgagttacttgtttcaacatgccaatttagattcttgcaaaagagtcttgaacgtggtgtgtaaaacttgtggacaacagcagacaacccttaagggtgtagaagctgttatgtacatgggcacactttcttatgaacaatttaagaaaggtgttcagataccttgtacgtgtggtaaacaagctacaaaatatctagtacaacaggagtcaccttttgttatgatgtcagcaccacctgctcagtatgaacttaagcatggtacatttacttgtgctagtgagtacactggtaattaccagtgtggtcactataaacatataacttctaaagaaactttgtattgcatagacggtgctttacttacaaagtcctcagaatacaaaggtcctattacggatgttttctacaaagaaaacagttacacaacaaccataaaaccagttacttataaattggatggtgttgtttgtacagaaattgaccctaagttggacaattattataagaaagacaattcttatttcacagagcaaccaattgatcttgtaccaaaccaaccatatccaaacgcaagcttcgataattttaagtttgtatgtgataatatcaaatttgctgatgatttaaaccagttaactggttataagaaacctgcttcaagagagcttaaagttacatttttccctgacttaaatggtgatgtggtggctattgattataaacactacacaccctcttttaagaaaggagctaaattgttacataaacctattgtttggcatgttaacaatgcaactaataaagccacgtataaaccaaatacctggtgtatacgttgtctttggagcacaaaaccagttgaaacatcaaattcgtttgatgtactgaagtcagaggacgcgcagggaatggataatcttgcctgcgaagatctaaaaccagtctctgaagaagtagtggaaaatcctaccatacagaaagacgttcttgagtgtaatgtgaaaactaccgaagttgtaggagacattatacttaaaccagcaaataatagtttaaaaattacagaagaggttggccacacagatctaatggctgcttatgtagacaattctagtcttactattaagaaacctaatgaattatctagagtattaggtttgaaaacccttgctactcatggtttagctgctgttaatagtgtcccttgggatactatagctaattatgctaagccttttcttaacaaagttgttagtacaactactaacatagttacacggtgtttaaaccgtgtttgtactaattatatgccttatttctttactttattgctacaattgtgtacttttactagaagtacaaattctagaattaaagcatctatgccgactactatagcaaagaatactgttaagagtgtcggtaaattttgtctagaggcttcatttaattatttgaagtcacctaatttttctaaactgataaatattataatttggtttttactattaagtgtttgcctaggttctttaatctactcaaccgctgctttaggtgttttaatgtctaatttaggcatgccttcttactgtactggttacagagaaggctatttgaactctactaatgtcactattgcaacctactgtactggttctataccttgtagtgtttgtcttagtggtttagattctttagacacctatccttctttagaaactatacaaattaccatttcatcttttaaatgggatttaactgcttttggcttagttgcagagtggtttttggcatatattcttttcactaggtttttctatgtacttggattggctgcaatcatgcaattgtttttcagctattttgcagtacattttattagtaattcttggcttatgtggttaataattaatcttgtacaaatggccccgatttcagctatggttagaatgtacatcttctttgcatcattttattatgtatggaaaagttatgtgcatgttgtagacggttgtaattcatcaacttgtatgatgtgttacaaacgtaatagagcaacaagagtcgaatgtacaactattgttaatggtgttagaaggtccttttatgtctatgctaatggaggtaaaggcttttgcaaactacacaattggaattgtgttaattgtgatacattctgtgctggtagtacatttattagtgatgaagttgcgagagacttgtcactacagtttaaaagaccaataaatcctactgaccagtcttcttacatcgttgatagtgttacagtgaagaatggttccatccatctttactttgataaagctggtcaaaagacttatgaaagacattctctctctcattttgttaacttagacaacctgagagctaataacactaaaggttcattgcctattaatgttatagtttttgatggtaaatcaaaatgtgaagaatcatctgcaaaatcagcgtctgtttactacagtcagcttatgtgtcaacctatactgttactagatcaggcattagtgtctgatgttggtgatagtgcggaagttgcagttaaaatgtttgatgcttacgttaatacgttttcatcaacttttaacgtaccaatggaaaaactcaaaacactagttgcaactgcagaagctgaacttgcaaagaatgtgtccttagacaatgtcttatctacttttatttcagcagctcggcaagggtttgttgattcagatgtagaaactaaagatgttgttgaatgtcttaaattgtcacatcaatctgacatagaagttactggcgatagttgtaataactatatgctcacctataacaaagttgaaaacatgacaccccgtgaccttggtgcttgtattgactgtagtgcgcgtcatattaatgcgcaggtagcaaaaagtcacaacattgctttgatatggaacgttaaagatttcatgtcattgtctgaacaactacgaaaacaaatacgtagtgctgctaaaaagaataacttaccttttaagttgacatgtgcaactactagacaagttgttaatgttgtaacaacaaagatagcacttaagggtggtaaaattattaataattggttgaagcagttaattaaagttacacttgtgttcctttttgttgctgctattttctatttaataacacctgttcatgtcatgtctaaacatactgacttttcaagtgaaatcataggatacaaggctattgatggtggtgtcactcgtgacatagcatctacagatacttgttttgctaacaaacatgctgattttgacacatggtttagccagcgtggtggtagttatactaatgacaaagcttgcccattgattgctgcagtcataacaagagaagtgggttttgtcgtgcctggtttgcctggcacgatattacgcacaactaatggtgactttttgcatttcttacctagagtttttagtgcagttggtaacatctgttacacaccatcaaaacttatagagtacactgactttgcaacatcagcttgtgttttggctgctgaatgtacaatttttaaagatgcttctggtaagccagtaccatattgttatgataccaatgtactagaaggttctgttgcttatgaaagtttacgccctgacacacgttatgtgctcatggatggctctattattcaatttcctaacacctaccttgaaggttctgttagagtggtaacaacttttgattctgagtactgtaggcacggcacttgtgaaagatcagaagctggtgtttgtgtatctactagtggtagatgggtacttaacaatgattattacagatctttaccaggagttttctgtggtgtagatgctgtaaatttacttactaatatgtttacaccactaattcaacctattggtgctttggacatatcagcatctatagtagctggtggtattgtagctatcgtagtaacatgccttgcctactattttatgaggtttagaagagcttttggtgaatacagtcatgtagttgcctttaatactttactattccttatgtcattcactgtactctgtttaacaccagtttactcattcttacctggtgtttattctgttatttacttgtacttgacattttatcttactaatgatgtttcttttttagcacatattcagtggatggttatgttcacacctttagtacctttctggataacaattgcttatatcatttgtatttccacaaagcatttctattggttctttagtaattacctaaagagacgtgtagtctttaatggtgtttcctttagtacttttgaagaagctgcgctgtgcacctttttgttaaataaagaaatgtatctaaagttgcgtagtgatgtgctattacctcttacgcaatataatagatacttagctctttataataagtacaagtattttagtggagcaatggatacaactagctacagagaagctgcttgttgtcatctcgcaaaggctctcaatgacttcagtaactcaggttctgatgttctttaccaaccaccacaaacctctatcacctcagctgttttgcagagtggttttagaaaaatggcattcccatctggtaaagttgagggttgtatggtacaagtaacttgtggtacaactacacttaacggtctttggcttgatgacgtagtttactgtccaagacatgtgatctgcacctctgaagacatgcttaaccctaattatgaagatttactcattcgtaagtctaatcataatttcttggtacaggctggtaatgttcaactcagggttattggacattctatgcaaaattgtgtacttaagcttaaggttgatacagccaatcctaagacacctaagtataagtttgttcgcattcaaccaggacagactttttcagtgttagcttgttacaatggttcaccatctggtgtttaccaatgtgctatgaggcccaatttcactattaagggttcattccttaatggttcatgtggtagtgttggttttaacatagattatgactgtgtctctttttgttacatgcaccatatggaattaccaactggagttcatgctggcacagacttagaaggtaacttttatggaccttttgttgacaggcaaacagcacaagcagctggtacggacacaactattacagttaatgttttagcttggttgtacgctgctgttataaatggagacaggtggtttctcaatcgatttaccacaactcttaatgactttaaccttgtggctatgaagtacaattatgaacctctaacacaagaccatgttgacatactaggacctctttctgctcaaactggaattgccgttttagatatgtgtgcttcattaaaagaattactgcaaaatggtatgaatggacgtaccatattgggtagtgctttattagaagatgaatttacaccttttgatgttgttagacaatgctcaggtgttactttccaaagtgcagtgaaaagaacaatcaagggtacacaccactggttgttactcacaattttgacttcacttttagttttagtccagagtactcaatggtctttgttcttttttttgtatgaaaatgcctttttaccttttgctatgggtattattgctatgtctgcttttgcaatgatgtttgtcaaacataagcatgcatttctctgtttgtttttgttaccttctcttgccactgtagcttattttaatatggtctatatgcctgctagttgggtgatgcgtattatgacatggttggatatggttgatactagtttgtctggttttaagctaaaagactgtgttatgtatgcatcagctgtagtgttactaatccttatgacagcaagaactgtgtatgatgatggtgctaggagagtgtggacacttatgaatgtcttgacactcgtttataaagtttattatggtaatgctttagatcaagccatttccatgtgggctcttataatctctgttacttctaactactcaggtgtagttacaactgtcatgtttttggccagaggtattgtttttatgtgtgttgagtattgccctattttcttcataactggtaatacacttcagtgtataatgctagtttattgtttcttaggctatttttgtacttgttactttggcctcttttgtttactcaaccgctactttagactgactcttggtgtttatgattacttagtttctacacaggagtttagatatatgaattcacagggactactcccacccaagaatagcatagatgccttcaaactcaacattaaattgttgggtgttggtggcaaaccttgtatcaaagtagccactgtacagtctaaaatgtcagatgtaaagtgcacatcagtagtcttactctcagttttgcaacaactcagagtagaatcatcatctaaattgtgggctcaatgtgtccagttacacaatgacattctcttagctaaagatactactgaagcctttgaaaaaatggtttcactactttctgttttgctttccatgcagggtgctgtagacataaacaagctttgtgaagaaatgctggacaacagggcaaccttacaagctatagcctcagagtttagttcccttccatcatatgcagcttttgctactgctcaagaagcttatgagcaggctgttgctaatggtgattctgaagttgttcttaaaaagttgaagaagtctttgaatgtggctaaatctgaatttgaccgtgatgcagccatgcaacgtaagttggaaaagatggctgatcaagctatgacccaaatgtataaacaggctagatctgaggacaagagggcaaaagttactagtgctatgcagacaatgcttttcactatgcttagaaagttggataatgatgcactcaacaacattatcaacaatgcaagagatggttgtgttcccttgaacataatacctcttacaacagcagccaaactaatggttgtcataccagactataacacatataaaaatacgtgtgatggtacaacatttacttatgcatcagcattgtgggaaatccaacaggttgtagatgcagatagtaaaattgttcaacttagtgaaattagtatggacaattcacctaatttagcatggcctcttattgtaacagctttaagggccaattctgctgtcaaattacagaataatgagcttagtcctgttgcactacgacagatgtcttgtgctgccggtactacacaaactgcttgcactgatgacaatgcgttagcttactacaacacaacaaagggaggtaggtttgtacttgcactgttatccgatttacaggatttgaaatgggctagattccctaagagtgatggaactggtactatctatacagaactggaaccaccttgtaggtttgttacagacacacctaaaggtcctaaagtgaagtatttatactttattaaaggattaaacaacctaaatagaggtatggtacttggtagtttagctgccacagtacgtctacaagctggtaatgcaacagaagtgcctgccaattcaactgtattatctttctgtgcttttgctgtagatgctgctaaagcttacaaagattatctagctagtgggggacaaccaatcactaattgtgttaagatgttgtgtacacacactggtactggtcaggcaataacagttacaccggaagccaatatggatcaagaatcctttggtggtgcatcgtgttgtctgtactgccgttgccacatagatcatccaaatcctaaaggattttgtgacttaaaaggtaagtatgtacaaatacctacaacttgtgctaatgaccctgtgggttttacacttaaaaacacagtctgtaccgtctgcggtatgtggaaaggttatggctgtagttgtgatcaactccgcgaacccatgcttcagtcagctgatgcacaatcgtttttaaacgggtttgcggtgtaagtgcagcccgtcttacaccgtgcggcacaggcactagtactgatgtcgtatacagggcttttgacatctacaatgataaagtagctggttttgctaaattcctaaaaactaattgttgtcgcttccaagaaaaggacgaagatgacaatttaattgattcttactttgtagttaagagacacactttctctaactaccaacatgaagaaacaatttataatttacttaaggattgtccagctgttgctaaacatgacttctttaagtttagaatagacggtgacatggtaccacatatatcacgtcaacgtcttactaaatacacaatggcagacctcgtctatgctttaaggcattttgatgaaggtaattgtgacacattaaaagaaatacttgtcacatacaattgttgtgatgatgattatttcaataaaaaggactggtatgattttgtagaaaacccagatatattacgcgtatacgccaacttaggtgaacgtgtacgccaagctttgttaaaaacagtacaattctgtgatgccatgcgaaatgctggtattgttggtgtactgacattagataatcaagatctcaatggtaactggtatgatttcggtgatttcatacaaaccacgccaggtagtggagttcctgttgtagattcttattattcattgttaatgcctatattaaccttgaccagggctttaactgcagagtcacatgttgacactgacttaacaaagccttacattaagtgggatttgttaaaatatgacttcacggaagagaggttaaaactctttgaccgttattttaaatattgggatcagacataccacccaaattgtgttaactgtttggatgacagatgcattctgcattgtgcaaactttaatgttttattctctacagtgttcccacttacaagttttggaccactagtgagaaaaatatttgttgatggtgttccatttgtagtttcaactggataccacttcagagagctaggtgttgtacataatcaggatgtaaatttacatagctctagacttagttttaaggaattacttgtgtatgctgctgaccctgctatgcacgctgcttctggtaatctattactagataaacgcactacgtgcttttcagtagctgcacttactaacaatgttgcttttcaaactgtcaaacccggtaattttaacaaagacttctatgactttgctgtgtctaagggtttctttaaggaaggaagttctgttgaattaaaacacttcttctttgctcaggatggtaatgctgctatcagcgattatgactactatcgttataatctaccaacaatgtgtgatatcagacaactactatttgtagttgaagttgttgataagtactttgattgttacgatggtggctgtattaatgctaaccaagtcatcgtcaacaacctagacaaatcagctggttttccatttaataaatggggtaaggctagactttattatgattcaatgagttatgaggatcaagatgcacttttcgcatatacaaaacgtaatgtcatccctactataactcaaatgaatcttaagtatgccattagtgcaaagaatagagctcgcaccgtagctggtgtctctatctgtagtactatgaccaatagacagtttcatcaaaaattattgaaatcaatagccgccactagaggagctactgtagtaattggaacaagcaaattctatggtggttggcacaacatgttaaaaactgtttatagtgatgtagaaaaccctcaccttatgggttgggattatcctaaatgtgatagagccatgcctaacatgcttagaattatggcctcacttgttcttgctcgcaaacatacaacgtgttgtagcttgtcacaccgtttctatagattagctaatgagtgtgctcaagtattgagtgaaatggtcatgtgtggcggttcactatatgttaaaccaggtggaacctcatcaggagatgccacaactgcttatgctaatagtgtttttaacatttgtcaagctgtcacggccaatgttaatgcacttttatctactgatggtaacaaaattgccgataagtatgtccgcaatttacaacacagactttatgagtgtctctatagaaatagagatgttgacacagactttgtgaatgagttttacgcatatttgcgtaaacatttctcaatgatgatactctctgacgatgctgttgtgtgtttcaatagcacttatgcatctcaaggtctagtggctagcataaagaactttaagtcagttctttattatcaaaacaatgtttttatgtctgaagcaaaatgttggactgagactgaccttactaaaggacctcatgaattttgctctcaacatacaatgctagttaaacagggtgatgattatgtgtaccttccttacccagatccatcaagaatcctaggggccggctgttttgtagatgatatcgtaaaaacagatggtacacttatgattgaacggttcgtgtctttagctatagatgcttacccacttactaaacatcctaatcaggagtatgctgatgtctttcatttgtacttacaatacataagaaagctacatgatgagttaacaggacacatgttagacatgtattctgttatgcttactaatgataacacttcaaggtattgggaacctgagttttatgaggctatgtacacaccgcatacagtcttacaggctgttggggcttgtgttctttgcaattcacagacttcattaagatgtggtgcttgcatacgtagaccattcttatgttgtaaatgctgttacgaccatgtcatatcaacatcacataaattagtcttgtctgttaatccgtatgtttgcaatgctccaggttgtgatgtcacagatgtgactcaactttacttaggaggtatgagctattattgtaaatcacataaaccacccattagttttccattgtgtgctaatggacaagtttttggtttatataaaaatacatgtgttggtagcgataatgttactgactttaatgcaattgcaacatgtgactggacaaatgctggtgattacattttagctaacacctgtactgaaagactcaagctttttgcagcagaaacgctcaaagctactgaggagacatttaaactgtcttatggtattgctactgtacgtgaagtgctgtctgacagagaattacatctttcatgggaagttggtaaacctagaccaccacttaaccgaaattatgtctttactggttatcgtgtaactaaaaacagtaaagtacaaataggagagtacacctttgaaaaaggtgactatggtgatgctgttgtttaccgaggtacaacaacttacaaattaaatgttggtgattattttgtgctgacatcacatacagtaatgccattaagtgcacctacactagtgccacaagagcactatgttagaattactggcttatacccaacactcaatatctcagatgagttttctagcaatgttgcaaattatcaaaaggttggtatgcaaaagtattctacactccagggaccacctggtactggtaagagtcattttgctattggcctagctctctactacccttctgctcgcatagtgtatacagcttgctctcatgccgctgttgatgcactatgtgagaaggcattaaaatatttgcctatagataaatgtagtagaattatacctgcacgtgctcgtgtagagtgttttgataaattcaaagtgaattcaacattagaacagtatgtcttttgtactgtaaatgcattgcctgagacgacagcagatatagttgtctttgatgaaatttcaatggccacaaattatgatttgagtgttgtcaatgccagattacgtgctaagcactatgtgtacattggcgaccctgctcaattacctgcaccacgcacattgctaactaagggcacactagaaccagaatatttcaattcagtgtgtagacttatgaaaactataggtccagacatgttcctcggaacttgtcggcgttgtcctgctgaaattgttgacactgtgagtgctttggtttatgataataagcttaaagcacataaagacaaatcagctcaatgctttaaaatgttttataagggtgttatcacgcatgatgtttcatctgcaattaacaggccacaaataggcgtggtaagagaattccttacacgtaaccctgcttggagaaaagctgtctttatttcaccttataattcacagaatgctgtagcctcaaagattttgggactaccaactcaaactgttgattcatcacagggctcagaatatgactatgtcatattcactcaaaccactgaaacagctcactcttgtaatgtaaacagatttaatgttgctattaccagagcaaaagtaggcatactttgcataatgtctgatagagacctttatgacaagttgcaatttacaagtcttgaaattccacgtaggaatgtggcaactttacaagctgaaaatgtaacaggactctttaaagattgtagtaaggtaatcactgggttacatcctacacaggcacctacacacctcagtgttgacactaaattcaaaactgaaggtttatgtgttgacatacctggcatacctaaggacatgacctatagaagactcatctctatgatgggttttaaaatgaattatcaagttaatggttaccctaacatgtttatcacccgcgaagaagctataagacatgtacgtgcatggattggcttcgatgtcgaggggtgtcatgctactagagaagctgttggtaccaatttacctttacagctaggtttttctacaggtgttaacctagttgctgtacctacaggttatgttgatacacctaataatacagatttttccagagttagtgctaaaccaccgcctggagatcaatttaaacacctcataccacttatgtacaaaggacttccttggaatgtagtgcgtataaagattgtacaaatgttaagtgacacacttaaaaatctctctgacagagtcgtatttgtcttatgggcacatggctttgagttgacatctatgaagtattttgtgaaaataggacctgagcgcacctgttgtctatgtgatagacgtgccacatgcttttccactgcttcagacacttatgcctgttggcatcattctattggatttgattacgtctataatccgtttatgattgatgttcaacaatggggttttacaggtaacctacaaagcaaccatgatctgtattgtcaagtccatggtaatgcacatgtagctagttgtgatgcaatcatgactaggtgtctagctgtccacgagtgctttgttaagcgtgttgactggactattgaatatcctataattggtgatgaactgaagattaatgcggcttgtagaaaggttcaacacatggttgttaaagctgcattattagcagacaaattcccagttcttcacgacattggtaaccctaaagctattaagtgtgtacctcaagctgatgtagaatggaagttctatgatgcacagccttgtagtgacaaagcttataaaatagaagaattattctattcttatgccacacattctgacaaattcacagatggtgtatgcctattttggaattgcaatgtcgatagatatcctgctaattccattgtttgtagatttgacactagagtgctatctaaccttaacttgcctggttgtgatggtggcagtttgtatgtaaataaacatgcattccacacaccagcttttgataaaagtgcttttgttaatttaaaacaattaccatttttctattactctgacagtccatgtgagtctcatggaaaacaagtagtgtcagatatagattatgtaccactaaagtctgctacgtgtataacacgttgcaatttaggtggtgctgtctgtagacatcatgctaatgagtacagattgtatctcgatgcttataacatgatgatctcagctggctttagcttgtgggtttacaaacaatttgatacttataacctctggaacacttttacaagacttcagagtttagaaaatgtggcttttaatgttgtaaataagggacactttgatggacaacagggtgaagtaccagtttctatcattaataacactgtttacacaaaagttgatggtgttgatgtagaattgtttgaaaataaaacaacattacctgttaatgtagcatttgagctttgggctaagcgcaacattaaaccagtaccagaggtgaaaatactcaataatttgggtgtggacattgctgctaatactgtgatctgggactacaaaagagatgctccagcacatatatctactattggtgtttgttctatgactgacatagccaagaaaccaactgaaacgatttgtgcaccactcactgtcttttttgatggtagagttgatggtcaagtagacttatttagaaatgcccgtaatggtgttcttattacagaaggtagtgttaaaggtttacaaccatctgtaggtcccaaacaagctagtcttaatggagtcacattaattggagaagccgtaaaaacacagttcaattattataagaaagttgatggtgttgtccaacaattacctgaaacttactttactcagagtagaaatttacaagaatttaaacccaggagtcaaatggaaattgatttcttagaattagctatggatgaattcattgaacggtataaattagaaggctatgccttcgaacatatcgtttatggagattttagtcatagtcagttaggtggtttacatctactgattggactagctaaacgttttaaggaatcaccttttgaattagaagattttattcctatggacagtacagttaaaaactatttcataacagatgcgcaaacaggttcatctaagtgtgtgtgttctgttattgatttattacttgatgattttgttgaaataataaaatcccaagatttatctgtagtttctaaggttgtcaaagtgactattgactatacagaaatttcatttatgctttggtgtaaagatggccatgtagaaacattttacccaaaattacaatctagtcaagcgtggcaaccgggtgttgctatgcctaatctttacaaaatgcaaagaatgctattagaaaagtgtgaccttcaaaattatggtgatagtgcaacattacctaaaggcataatgatgaatgtcgcaaaatatactcaactgtgtcaatatttaaacacattaacattagctgtaccctataatatgagagttatacattttggtgctggttctgataaaggagttgcaccaggtacagctgttttaagacagtggttgcctacgggtacgctgcttgtcgactcagatcttaatgactttgtctctgatgcagattcaactttgattggtgattgtgcaactgtacatacagctaataaatgggatctcattattagtgatatgtacgaccctaagactaaaaatgttacaaaagaaaatgactctaaagagggttttttcacttacatttgtgggtttatacaacaaaagctagctcttggaggttccgtggctataaagataacagaacattcttggaatgctgatctttataagctcatgggacacttcgcatggtggacagcctttgttactaatgtgaatgcgtcatcatctgaagcatttttaattggatgtaattatcttggcaaaccacgcgaacaaatagatggttatgtcatgcatgcaaattacatattttggaggaatacaaatccaattcagttgtcttcctattctttatttgacatgagtaaatttccccttaaattaaggggtactgctgttatgtctttaaaagaaggtcaaatcaatgatatgattttatctcttcttagtaaaggtagacttataattagagaaaacaacagagttgttatttctagtgatgttcttgttaacaactaaacgaacaatgtttgtttttcttgttttattgccactagtctctagtcagtgtgttaatcttacaaccagaactcaattaccccctgcatacactaattctttcacacgtggtgtttattaccctgacaaagttttcagatcctcagttttacattcaactcaggacttgttcttacctttcttttccaatgttacttggttccatgctatacatgtctctgggaccaatggtactaagaggtttgataaccctgtcctaccatttaatgatggtgtttattttgcttccactgagaagtctaacataataagaggctggatttttggtactactttagattcgaagacccagtccctacttattgttaataacgctactaatgttgttattaaagtctgtgaatttcaattttgtaatgatccatttttgggtgtttattaccacaaaaacaacaaaagttggatggaaagtgagttcagagtttattctagtgcgaataattgcacttttgaatatgtctctcagccttttcttatggaccttgaaggaaaacagggtaatttcaaaaatcttagggaatttgtgtttaagaatattgatggttattttaaaatatattctaagcacacgcctattaatttagtgcgtgatctccctcagggtttttcggctttagaaccattggtagatttgccaataggtattaacatcactaggtttcaaactttacttgctttacatagaagttatttgactcctggtgattcttcttcaggttggacagctggtgctgcagcttattatgtgggttatcttcaacctaggacttttctattaaaatataatgaaaatggaaccattacagatgctgtagactgtgcacttgaccctctctcagaaacaaagtgtacgttgaaatccttcactgtagaaaaaggaatctatcaaacttctaactttagagtccaaccaacagaatctattgttagatttcctaatattacaaacttgtgcccttttggtgaagtttttaacgccaccagatttgcatctgtttatgcttggaacaggaagagaatcagcaactgtgttgctgattattctgtcctatataattccgcatcattttccacttttaagtgttatggagtgtctcctactaaattaaatgatctctgctttactaatgtctatgcagattcatttgtaattagaggtgatgaagtcagacaaatcgctccagggcaaactggaaagattgctgattataattataaattaccagatgattttacaggctgcgttatagcttggaattctaacaatcttgattctaaggttggtggtaattataattacctgtatagattgtttaggaagtctaatctcaaaccttttgagagagatatttcaactgaaatctatcaggccggtagcacaccttgtaatggtgttgaaggttttaattgttactttcctttacaatcatatggtttccaacccactaatggtgttggttaccaaccatacagagtagtagtactttcttttgaacttctacatgcaccagcaactgtttgtggacctaaaaagtctactaatttggttaaaaacaaatgtgtcaatttcaacttcaatggtttaacaggcacaggtgttcttactgagtctaacaaaaagtttctgcctttccaacaatttggcagagacattgctgacactactgatgctgtccgtgatccacagacacttgagattcttgacattacaccatgttcttttggtggtgtcagtgttataacaccaggaacaaatacttctaaccaggttgctgttctttatcagggtgttaactgcacagaagtccctgttgctattcatgcagatcaacttactcctacttggcgtgtttattctacaggttctaatgtttttcaaacacgtgcaggctgtttaataggggctgaacatgtcaacaactcatatgagtgtgacatacccattggtgcaggtatatgcgctagttatcagactcagactaattctcctcggcgggcacgtagtgtagctagtcaatccatcattgcctacactatgtcacttggtgcagaaaattcagttgcttactctaataactctattgccatacccacaaattttactattagtgttaccacagaaattctaccagtgtctatgaccaagacatcagtagattgtacaatgtacatttgtggtgattcaactgaatgcagcaatcttttgttgcaatatggcagtttttgtacacaattaaaccgtgctttaactggaatagctgttgaacaagacaaaaacacccaagaagtttttgcacaagtcaaacaaatttacaaaacaccaccaattaaagattttggtggttttaatttttcacaaatattaccagatccatcaaaaccaagcaagaggtcatttattgaagatctacttttcaacaaagtgacacttgcagatgctggcttcatcaaacaatatggtgattgccttggtgatattgctgctagagacctcatttgtgcacaaaagtttaacggccttactgttttgccacctttgctcacagatgaaatgattgctcaatacacttctgcactgttagcgggtacaatcacttctggttggacctttggtgcaggtgctgcattacaaataccatttgctatgcaaatggcttataggtttaatggtattggagttacacagaatgttctctatgagaaccaaaaattgattgccaaccaatttaatagtgctattggcaaaattcaagactcactttcttccacagcaagtgcacttggaaaacttcaagatgtggtcaaccaaaatgcacaagctttaaacacgcttgttaaacaacttagctccaattttggtgcaatttcaagtgttttaaatgatatcctttcacgtcttgacaaagttgaggctgaagtgcaaattgataggttgatcacaggcagacttcaaagtttgcagacatatgtgactcaacaattaattagagctgcagaaatcagagcttctgctaatcttgctgctactaaaatgtcagagtgtgtacttggacaatcaaaaagagttgatttttgtggaaagggctatcatcttatgtccttccctcagtcagcacctcatggtgtagtcttcttgcatgtgacttatgtccctgcacaagaaaagaacttcacaactgctcctgccatttgtcatgatggaaaagcacactttcctcgtgaaggtgtctttgtttcaaatggcacacactggtttgtaacacaaaggaatttttatgaaccacaaatcattactacagacaacacatttgtgtctggtaactgtgatgttgtaataggaattgtcaacaacacagtttatgatcctttgcaacctgaattagactcattcaaggaggagttagataaatattttaagaatcatacatcaccagatgttgatttaggtgacatctctggcattaatgcttcagttgtaaacattcaaaaagaaattgaccgcctcaatgaggttgccaagaatttaaatgaatctctcatcgatctccaagaacttggaaagtatgagcagtatataaaatggccatggtacatttggctaggttttatagctggcttgattgccatagtaatggtgacaattatgctttgctgtatgaccagttgctgtagttgtctcaagggctgttgttcttgtggatcctgctgcaaatttgatgaagacgactctgagccagtgctcaaaggagtcaaattacattacacataaacgaacttatggatttgtttatgagaatcttcacaattggaactgtaactttgaagcaaggtgaaatcaaggatgctactccttcagattttgttcgcgctactgcaacgataccgatacaagcctcactccctttcggatggcttattgttggcgttgcacttcttgctgtttttcagagcgcttccaaaatcataaccctcaaaaagagatggcaactagcactctccaagggtgttcactttgtttgcaacttgctgttgttgtttgtaacagtttactcacaccttttgctcgttgctgctggccttgaagccccttttctctatctttatgctttagtctacttcttgcagagtataaactttgtaagaataataatgaggctttggctttgctggaaatgccgttccaaaaacccattactttatgatgccaactattttctttgctggcatactaattgttacgactattgtataccttacaatagtgtaacttcttcaattgtcattacttcaggtgatggcacaacaagtcctatttctgaacatgactaccagattggtggttatactgaaaaatgggaatctggagtaaaagactgtgttgtattacacagttacttcacttcagactattaccagctgtactcaactcaattgagtacagacactggtgttgaacatgttaccttcttcatctacaataaaattgttgatgagcctgaagaacatgtccaaattcacacaatcgacggttcatccggagttgttaatccagtaatggaaccaatttatgatgaaccgacgacgactactagcgtgcctttgtaagcacaagctgatgagtacgaacttatgtactcattcgtttcggaagagacaggtacgttaatagttaatagcgtacttctttttcttgctttcgtggtattcttgctagttacactagccatccttactgcgcttcgattgtgtgcgtactgctgcaatattgttaacgtgagtcttgtaaaaccttctttttacgtttactctcgtgttaaaaatctgaattcttctagagttcctgatcttccggtctaaacgaactaaatattatattagtttttctgtttggaactttaattttagccatggcagattccaacggtactattaccgttgaagagcttaaaaagctccttgaacaatggaacctagtaataggtttcctattccttacatggatttgtcttctacaatttgcctatgccaacaggaataggtttttgtatataattaagttaattttcctctggctgttatggccagtaactttagcttgttttgtgcttgctgctgtttacagaataaattggatcaccggtggaattgctatcgcaatggcttgtcttgtaggcttgatgtggctcagctacttcattgcttctttcagactgtttgcgcgtacgcgttccatgtggtcattcaatccagaaactaacattcttctcaacgtgccactccatggcactattctgaccagaccgcttctagaaagtgaactcgtaatcggagctgtgatccttcgtggacatcttcgtattgctggacaccatctaggacgctgtgacatcaaggacctgcctaaagaaatcactgttgctacatcacgaacgctttcttattacaaattgggagcttcgcagcgtgtagcaggtgactcaggttttgctgcatacagtcgctacaggattggcaactataaattaaacacagaccattccagtagcagtgacaatattgctttgcttgtacagtaagtgacaacagatgtttcatctcgttgactttcaggttactatagcagagatattactaattattatgaggacttttaaagtttccatttggaatcttgattacatcataaacctcataattaaaaatttatctaagtcactaactgagaataaatattctcaattagatgaagagcaaccaatggagattgattaaacgaacatgaaaattattcttttcttggcactgataacactcgctacttgtgagctttatcactaccaagagtgtgttagaggtacaacagtacttttaaaagaaccttgctcttctggaacatacgagggcaattcaccatttcatcctctagctgataacaaatttgcactgacttgctttagcactcaatttgcttttgcttgtcctgacggcgtaaaacacgtctatcagttacgtgccagatcagtttcacctaaactgttcatcagacaagaggaagttcaagaactttactctccaatttttcttattgttgcggcaatagtgtttataacactttgcttcacactcaaaagaaagacagaatgattgaactttcattaattgacttctatttgtgctttttagcctttctgctattccttgttttaattatgcttattatcttttggttctcacttgaactgcaagatcataatgaaacttgtcacgcctaaacgaacatgaaatttcttgttttcttaggaatcatcacaactgtagctgcatttcaccaagaatgtagtttacagtcatgtactcaacatcaaccatatgtagttgatgacccgtgtcctattcacttctattctaaatggtatattagagtaggagctagaaaatcagcacctttaattgaattgtgcgtggatgaggctggttctaaatcacccattcagtacatcgatatcggtaattatacagtttcctgtttaccttttacaattaattgccaggaacctaaattgggtagtcttgtagtgcgttgttcgttctatgaagactttttagagtatcatgacgttcgtgttgttttagatttcatctaaacgaacaaactaaaatgtctgataatggaccccaaaatcagcgaaatgcaccccgcattacgtttggtggaccctcagattcaactggcagtaaccagaatggagaacgcagtggggcgcgatcaaaacaacgtcggccccaaggtttacccaataatactgcgtcttggttcaccgctctcactcaacatggcaaggaagaccttaaattccctcgaggacaaggcgttccaattaacaccaatagcagtccagatgaccaaattggctactaccgaagagctaccagacgaattcgtggtggtgacggtaaaatgaaagatctcagtccaagatggtatttctactacctaggaactgggccagaagctggacttccctatggtgctaacaaagacggcatcatatgggttgcaactgagggagccttgaatacaccaaaagatcacattggcacccgcaatcctgctaacaatgctgcaatcgtgctacaacttcctcaaggaacaacattgccaaaaggcttctacgcagaagggagcagaggcggcagtcaagcctcttctcgttcctcatcacgtagtcgcaacagttcaagaaattcaactccaggcagcagtaggggaacttctcctgctagaatggctggcaatggcggtgatgctgctcttgctttgctgctgcttgacagattgaaccagcttgagagcaaaatgtctggtaaaggccaacaacaacaaggccaaactgtcactaagaaatctgctgctgaggcttctaagaagcctcggcaaaaacgtactgccactaaagcatacaatgtaacacaagctttcggcagacgtggtccagaacaaacccaaggaaattttggggaccaggaactaatcagacaaggaactgattacaaacattggccgcaaattgcacaatttgcccccagcgcttcagcgttcttcggaatgtcgcgcattggcatggaagtcacaccttcgggaacgtggttgacctacacaggtgccatcaaattggatgacaaagatccaaatttcaaagatcaagtcattttgctgaataagcatattgacgcatacaaaacattcccaccaacagagcctaaaaaggacaaaaagaagaaggctgatgaaactcaagccttaccgcagagacagaagaaacagcaaactgtgactcttcttcctgctgcagatttggatgatttctccaaacaattgcaacaatccatgagcagtgctgactcaactcaggcctaaactcatgcagaccacacaaggcagatgggctatataaacgttttcgcttttccgtttacgatatatagtctactcttgtgcagaatgaattctcgtaactacatagcacaagtagatgtagttaactttaatctcacatagcaatctttaatcagtgtgtaacattagggaggacttgaa

SEQ ID NO: 39 - DNA, 29728 bp, synthetic construct
  misc_feature 1..29728: note = Reconstituted virus 2
  source 1..29728: mol_type = other DNA
tataccttcctaggtaacaaaccaaccaactttcgatctcttgtagatctgttctctaaacgaactttaaaatctgtgtggctgtcactcggctgcatgcttagtgcactcacgcagtataattaataactaattactgtcgttgacaggacacgagtaactcgtctatcttctgcaggctgcttacggtttcgtccgtgttgcagccgatcatcagcacatctaggttttgtccgggtgtgaccgaaaggtaagatggagagccttgtccctggtttcaacgagaaaacacacgtccaactcagtttgcctgttttacaggttcgcgacgtgctcgtacgtggctttggagactccgtggaggaggtcttatcagaggcacgtcaacatcttaaagatggcacttgtggcttagtagaagttgaaaaaggcgttttgcctcaacttgaacagccctatgtgttcatcaaacgttcggatgctcgaactgcacctcatggtcatgttatggttgagctggtagcagaactcgaaggcattcagtacggtcgtagtggtgagacacttggtgtccttgtccctcatgtgggcgaaataccagtggcttaccgcaaggttcttcttcgtaagaacggtaataaaggagctggtggccatagttacggcgccgatctaaagtcatttgacttaggcgacgagcttggcactgatccttatgaagattttcaagaaaactggaacactaaacatagcagtggtgttacccgtgaactcatgcgtgagcttaacggaggggcatacactcgctatgtcgataacaacttctgtggccctgatggctaccctcttgagtgcattaaagaccttctagcacgtgctggtaaagcttcatgcactttgtccgaacaactggactttattgacactaagaggggtgtatactgctgccgtgaacatgagcatgaaattgcttggtacacggaacgttctgaaaagagctatgaattgcagacaccttttgaaattaaattggcaaagaaatttgacaccttcaatggggaatgtccaaattttgtatttcccttaaattccataatcaagactattcaaccaagggttgaaaagaaaaagcttgatggctttatgggtagaattcgatctgtctatccagttgcgtcaccaaatgaatgcaaccaaatgtgcctttcaactctcatgaagtgtgatcattgtggtgaaacttcatggcagacgggcgattttgttaaagccacttgcgaattttgtggcactgagaatttgactaaagaaggtgccactacttgtggttacttaccccaaaatgctgttgttaaaatttattgtccagcatgtcacaattcagaagtaggacctgagcatagtcttgccgaataccataatgaatctggcttgaaaaccattcttcgtaagggtggtcgcactattgcctttggaggctgtgtgttctcttatgttggttgccataacaagtgtgcctattgggttccacgtgctagcgctaacataggttgtaaccatacaggtgttgttggagaaggttccgaaggtcttaatgacaaccttcttgaaatactccaaaaagagaaagtcaacatcaatattgttggtgactttaaacttaatgaagagatcgccattattttggcatctttttctgcttccacaagtgcttttgtggaaactgtgaaaggtttggattataaagcattcaaacaaattgttgaatcctgtggtaattttaaagttacaaaaggaaaagctaaaaaaggtgcctggaatattggtgaacagaaatcaatactgagtcctctttatgcatttgcatcagaggctgctcgtgttgtacgatcaattttctcccgcactcttgaaactgctcaaaattctgtgcgtgttttacagaaggccgctataacaatactagatggaatttcacagtattcactgagactcattgatgctatgatgttcacatctgatttggctactaacaatctagttgtaatggcctacattacaggtggtgttgttcagttgacttcgcagtggctaactaacatctttggcactgtttatgaaaaactcaaacccgtccttgattggcttgaagagaagtttaaggaaggtgtagagtttcttagagacggttgggaaattgttaaatttatctcaacctgtgcttgtgaaattgtcggtggacaaattgtcacctgtgcaaaggaaattaaggagagtgttcagacattctttaagcttgtaaataaatttttggctttgtgtgctgactctatcattattggtggagctaaacttaaagccttgaatttaggtgaaacatttgtcacgcactcaaagggattgtacagaaagtgtgttaaatccagagaagaaactggcctactcatgcctctaaaagccccaaaagaaattatcttcttagagggagaaacacttcccacagaagtgttaacagaggaagttgtcttgaaaactggtgatttacaaccattagaacaacctactagtgaagctgttgaagctccattggttggtacaccagtttgtattaacgggcttatgttgctcgaaatcaaagacacagaaaagtactgtgcccttgcacctaatatgatggtaacaaacaataccttcacactcaaaggcggtgcaccaacaaaggttacttttggtgatgacactgtgatagaagtgcaaggttacaagagtgtgaatatcacttttgaacttgatgaaaggattgataaagtacttaatgagaagtgctctgcctatacagttgaactcggtacagaagtaaatgagttcgcctgtgttgtggcagatgctgtcataaaaactttgcaaccagtatctgaattacttacaccactgggcattgatttagatgagtggagtatggctacatactacttatttgatgagtctggtgagtttaaattggcttcacatatgtattgttctttttaccctccagatgaggatgaagaagaaggtgattgtgaagaagaagagtttgagccatcaactcaatatgagtatggtactgaagatgattaccaaggtaaacctttggaatttggtgccacttctgctgctcttcaacctgaagaagagcaagaagaagattggttagatgatgatagtcaacaaactgttggtcaacaagacggcagtgaggacaatcagacaactactattcaaacaattgttgaggttcaacctcaattagagatggaacttacaccagttgttcagactattgaagtgaatagttttagtggttatttaaaacttactgacaatgtatacattaaaaatgcagacattgtggaagaagctaaaaaggtaaaaccaacagtggttgttaatgcagccaatgtttaccttaaacatggaggaggtgttgcaggagccttaaataaggctactaacaatgccatgcaagttgaatctgatgattacatagctactaatggaccacttaaagtgggtggtagttgtgttttaagcggacacaatcttgctaaacactgtcttcatgttgtcggcccaaatgttaacaaaggtgaagacattcaacttcttaagagtgcttatgaaaattttaatcagcacgaagttctacttgcaccattattatcagctggtatttttggtgctgaccctatacattctttaagagtttgtgtagatactgttcgcacaaatgtctacttagctgtctttgataaaaatctctatgacaaacttgtttcaagctttttggaaatgaagagtgaaaagcaagttgaacaaaagatcgctgagattcctaaagaggaagttaagccatttataactgaaagtaaaccttcagttgaacagagaaaacaagatgataagaaaatcaaagcttgtgttgaagaagttacaacaactctggaagaaactaagttcctcacagaaaacttgttactttatattgacattaatggcaatcttcatccagattctgccactcttgttagtgacattgacatcactttcttaaagaaagatgctccatatatagtgggtgatgttgttcaagagggtgttttaactgctgtggttatacctactaaaaaggctggtggcactactgaaatgctagcgaaagctttgagaaaagtgccaacagacaattatataaccacttacccgggtcagggtttaaatggttacactgtagaggaggcaaagacagtgcttaaaaagtgtaaaagtgccttttacattctaccatctattatctctaatgagaagcaagaaattcttggaactgtttcttggaatttgcgagaaatgcttgcacatgcagaagaaacacgcaaattaatgcctgtctgtgtggaaactaaagccatagtttcaactatacagcgtaaatataagggtattaaaatacaagagggtgtggttgattatggtgctagattttacttttacaccagtaaaacaactgtagcgtcacttatcaacacacttaacgatctaaatgaaactcttgttacaatgccacttggctatgtaacacatggcttaaatttggaagaagctgctcggtatatgagatctctcaaagtgccagctacagtttctgtttcttcacctgatgctgttacagcgtataatggttatcttacttcttcttctaaaacacctgaagaacattttattgaaaccatctcacttgctggttcctataaagattggtcctattctggacaatctacacaactaggtatagaatttcttaagagaggtgataaaagtgtatattacactagtaatcctaccacattccacctagatggtgaagttatcacctttgacaatcttaagacacttctttctttgagagaagtgaggactattaaggtgtttacaacagtagacaacattaacctccacacgcaagttgtggacatgtcaatgacatatggacaacagtttggtccaacttatttggatggagctgatgttactaaaataaaacctcataattcacatgaaggtaaaacattttatgttttacctaatgatgacactctacgtgttgaggcttttgagtactaccacacaactgatcctagttttctgggtaggtacatgtcagcattaaatcacactaaaaagtggaaatacccacaagttaatggtttaacttctattaaatgggcagataacaactgttatcttgccactgcattgttaacactccaacaaatagagttgaagtttaatccacctgctctacaagatgcttattacagagcaagggctggtgaagctgctaacttttgtgcacttatcttagcctactgtaataagacagtaggtgagttaggtgatgttagagaaacaatgagttacttgtttcaacatgccaatttagattcttgcaaaagagtcttgaacgtggtgtgtaaaacttgtggacaacagcagacaacccttaagggtgtagaagctgttatgtacatgggcacactttcttatgaacaatttaagaaaggtgttcagataccttgtacgtgtggtaaacaagctacaaaatatctagtacaacaggagtcaccttttgttatgatgtcagcaccacctgctcagtatgaacttaagcatggtacatttacttgtgctagtgagtacactggtaattaccagtgtggtcactataaacatataacttctaaagaaactttgtattgcatagacggtgctttacttacaaagtcctcagaatacaaaggtcctattacggatgttttctacaaagaaaacagttacacaacaaccataaaaccagttacttataaattggatggtgttgtttgtacagaaattgaccctaagttggacaattattataagaaagacaattcttatttcacagagcaaccaattgatcttgtaccaaaccaaccatatccaaacgcaagcttcgataattttaagtttgtatgtgataatatcaaatttgctgatgatttaaaccagttaactggttataagaaacctgcttcaagagagcttaaagttacatttttccctgacttaaatggtgatgtggtggctattgattataaacactacacaccctcttttaagaaaggagctaaattgttacataaacctattgtttggcatgttaacaatgcaactaataaagccacgtataaaccaaatacctggtgtatacgttgtctttggagcacaaaaccagttgaaacatcaaattcgtttgatgtactgaagtcagaggacgcgcagggaatggataatcttgcctgcgaagatctaaaaccagtctctgaagaagtagtggaaaatcctaccatacagaaagacgttcttgagtgtaatgtgaaaactaccgaagttgtaggagacattatacttaaaccagcaaataatagtttaaaaattacagaagaggttggccacacagatctaatggctgcttatgtagacaattctagtcttactattaagaaacctaatgaattatctagagtattaggtttgaaaacccttgctactcatggtttagctgctgttaatagtgtcccttgggatactatagctaattatgctaagccttttcttaacaaagttgttagtacaactactaacatagttacacggtgtttaaaccgtgtttgtactaattatatgccttatttctttactttattgctacaattgtgtacttttactagaagtacaaattctagaattaaagcatctatgccgactactatagcaaagaatactgttaagagtgtcggtaaattttgtctagaggcttcatttaattatttgaagtcacctaatttttctaaactgataaatattataatttggtttttactattaagtgtttgcctaggttctttaatctactcaaccgctgctttaggtgttttaatgtctaatttaggcatgccttcttactgtactggttacagagaaggctatttgaactctactaatgtcactattgcaacctactgtactggttctataccttgtagtgtttgtcttagtggtttagattctttagacacctatccttctttagaaactatacaaattaccatttcatcttttaaatgggatttaactgcttttggcttagttgcagagtggtttttggcatatattcttttcactaggtttttctatgtacttggattggctgcaatcatgcaattgtttttcagctattttgcagtacattttattagtaattcttggcttatgtggttaataattaatcttgtacaaatggccccgatttcagctatggttagaatgtacatcttctttgcatcattttattatgtatggaaaagttatgtgcatgttgtagacggttgtaattcatcaacttgtatgatgtgttacaaacgtaatagagcaacaagagtcgaatgtacaactattgttaatggtgttagaaggtccttttatgtctatgctaatggaggtaaaggcttttgcaaactacacaattggaattgtgttaattgtgatacattctgtgctggtagtacatttattagtgatgaagttgcgagagacttgtcactacagtttaaaagaccaataaatcctactgaccagtcttcttacatcgttgatagtgttacagtgaagaatggttccatccatctttactttgataaagctggtcaaaagacttatgaaagacattctctctctcattttgttaacttagacaacctgagagctaataacactaaaggttcattgcctattaatgttatagtttttgatggtaaatcaaaatgtgaagaatcatctgcaaaatcagcgtctgtttactacagtcagcttatgtgtcaacctatactgttactagatcaggcattagtgtctgatgttggtgatagtgcggaagttgcagttaaaatgtttgatgcttacgttaatacgttttcatcaacttttaacgtaccaatggaaaaactcaaaacactagttgcaactgcagaagctgaacttgcaaagaatgtgtccttagacaatgtcttatctacttttatttcagcagctcggcaagggtttgttgattcagatgtagaaactaaagatgttgttgaatgtcttaaattgtcacatcaatctgacatagaagttactggcgatagttgtaataactatatgctcacctataacaaagttgaaaacatgacaccccgtgaccttggtgcttgtattgactgtagtgcgcgtcatattaatgcgcaggtagcaaaaagtcacaacattgctttgatatggaacgttaaagatttcatgtcattgtctgaacaactacgaaaacaaatacgtagtgctgctaaaaagaataacttaccttttaagttgacatgtgcaactactagacaagttgttaatgttgtaacaacaaagatagcacttaagggtggtaaaattattaataattggttgaagcagttaattaaagttacacttgtgttcctttttgttgctgctattttctatttaataacacctgttcatgtcatgtctaaacatactgacttttcaagtgaaatcataggatacaaggctattgatggtggtgtcactcgtgacatagcatctacagatacttgttttgctaacaaacatgctgattttgacacatggtttagccagcgtggtggtagttatactaatgacaaagcttgcccattgattgctgcagtcataacaagagaagtgggttttgtcgtgcctggtttgcctggcacgatattacgcacaactaatggtgactttttgcatttcttacctagagtttttagtgcagttggtaacatctgttacacaccatcaaaacttatagagtacactgactttgcaacatcagcttgtgttttggctgctgaatgtacaatttttaaagatgcttctggtaagccagtaccatattgttatgataccaatgtactagaaggttctgttgcttatgaaagtttacgccctgacacacgttatgtgctcatggatggctctattattcaatttcctaacacctaccttgaaggttctgttagagtggtaacaacttttgattctgagtactgtaggcacggcacttgtgaaagatcagaagctggtgtttgtgtatctactagtggtagatgggtacttaacaatgattattacagatctttaccaggagttttctgtggtgtagatgctgtaaatttacttactaatatgtttacaccactaattcaacctattggtgctttggacatatcagcatctatagtagctggtggtattgtagctatcgtagtaacatgccttgcctactattttatgaggtttagaagagcttttggtgaatacagtcatgtagttgcctttaatactttactattccttatgtcattcactgtactctgtttaacaccagtttactcattcttacctggtgtttattctgttatttacttgtacttgacattttatcttactaatgatgtttcttttttagcacatattcagtggatggttatgttcacacctttagtacctttctggataacaattgcttatatcatttgtatttccacaaagcatttctattggttctttagtaattacctaaagagacgtgtagtctttaatggtgtttcctttagtacttttgaagaagctgcgctgtgcacctttttgttaaataaagaaatgtatctaaagttgcgtagtgatgtgctattacctcttacgcaatataatagatacttagctctttataataagtacaagtattttagtggagcaatggatacaactagctacagagaagctgcttgttgtcatctcgcaaaggctctcaatgacttcagtaactcaggttctgatgttctttaccaaccaccacaaacctctatcacctcagctgttttgcagagtggttttagaaaaatggcattcccatctggtaaagttgagggttgtatggtacaagtaacttgtggtacaactacacttaacggtctttggcttgatgacgtagtttactgtccaagacatgtgatctgcacctctgaagacatgcttaaccctaattatgaagatttactcattcgtaagtctaatcataatttcttggtacaggctggtaatgttcaactcagggttattggacattctatgcaaaattgtgtacttaagcttaaggttgatacagccaatcctaagacacctaagtataagtttgttcgcattcaaccaggacagactttttcagtgttagcttgttacaatggttcaccatctggtgtttaccaatgtgctatgaggcccaatttcactattaagggttcattccttaatggttcatgtggtagtgttggttttaacatagattatgactgtgtctctttttgttacatgcaccatatggaattaccaactggagttcatgctggcacagacttagaaggtaacttttatggaccttttgttgacaggcaaacagcacaagcagctggtacggacacaactattacagttaatgttttagcttggttgtacgctgctgttataaatggagacaggtggtttctcaatcgatttaccacaactcttaatgactttaaccttgtggctatgaagtacaattatgaacctctaacacaagaccatgttgacatactaggacctctttctgctcaaactggaattgccgttttagatatgtgtgcttcattaaaagaattactgcaaaatggtatgaatggacgtaccatattgggtagtgctttattagaagatgaatttacaccttttgatgttgttagacaatgctcaggtgttactttccaaagtgcagtgaaaagaacaatcaagggtacacaccactggttgttactcacaattttgacttcacttttagttttagtccagagtactcaatggtctttgttcttttttttgtatgaaaatgcctttttaccttttgctatgggtattattgctatgtctgcttttgcaatgatgtttgtcaaacataagcatgcatttctctgtttgtttttgttaccttctcttgccactgtagcttattttaatatggtctatatgcctgctagttgggtgatgcgtattatgacatggttggatatggttgatactagtttgtctggttttaagctaaaagactgtgttatgtatgcatcagctgtagtgttactaatccttatgacagcaagaactgtgtatgatgatggtgctaggagagtgtggacacttatgaatgtcttgacactcgtttataaagtttattatggtaatgctttagatcaagccatttccatgtgggctcttataatctctgttacttctaactactcaggtgtagttacaactgtcatgtttttggccagaggtattgtttttatgtgtgttgagtattgccctattttcttcataactggtaatacacttcagtgtataatgctagtttattgtttcttaggctatttttgtacttgttactttggcctcttttgtttactcaaccgctactttagactgactcttggtgtttatgattacttagtttctacacaggagtttagatatatgaattcacagggactactcccacccaagaatagcatagatgccttcaaactcaacattaaattgttgggtgttggtggcaaaccttgtatcaaagtagccactgtacagtctaaaatgtcagatgtaaagtgcacatcagtagtcttactctcagttttgcaacaactcagagtagaatcatcatctaaattgtgggctcaatgtgtccagttacacaatgacattctcttagctaaagatactactgaagcctttgaaaaaatggtttcactactttctgttttgctttccatgcagggtgctgtagacataaacaagctttgtgaagaaatgctggacaacagggcaaccttacaagctatagcctcagagtttagttcccttccatcatatgcagcttttgctactgctcaagaagcttatgagcaggctgttgctaatggtgattctgaagttgttcttaaaaagttgaagaagtctttgaatgtggctaaatctgaatttgaccgtgatgcagccatgcaacgtaagttggaaaagatggctgatcaagctatgacccaaatgtataaacaggctagatctgaggacaagagggcaaaagttactagtgctatgcagacaatgcttttcactatgcttagaaagttggataatgatgcactcaacaacattatcaacaatgcaagagatggttgtgttcccttgaacataatacctcttacaacagcagccaaactaatggttgtcataccagactataacacatataaaaatacgtgtgatggtacaacatttacttatgcatcagcattgtgggaaatccaacaggttgtagatgcagatagtaaaattgttcaacttagtgaaattagtatggacaattcacctaatttagcatggcctcttattgtaacagctttaagggccaattctgctgtcaaattacagaataatgagcttagtcctgttgcactacgacagatgtcttgtgctgccggtactacacaaactgcttgcactgatgacaatgcgttagcttactacaacacaacaaagggaggtaggtttgtacttgcactgttatccgatttacaggatttgaaatgggctagattccctaagagtgatggaactggtactatctatacagaactggaaccaccttgtaggtttgttacagacacacctaaaggtcctaaagtgaagtatttatactttattaaaggattaaacaacctaaatagaggtatggtacttggtagtttagctgccacagtacgtctacaagctggtaatgcaacagaagtgcctgccaattcaactgtattatctttctgtgcttttgctgtagatgctgctaaagcttacaaagattatctagctagtgggggacaaccaatcactaattgtgttaagatgttgtgtacacacactggtactggtcaggcaataacagttacaccggaagccaatatggatcaagaatcctttggtggtgcatcgtgttgtctgtactgccgttgccacatagatcatccaaatcctaaaggattttgtgacttaaaaggtaagtatgtacaaatacctacaacttgtgctaatgaccctgtgggttttacacttaaaaacacagtctgtaccgtctgcggtatgtggaaaggttatggctgtagttgtgatcaactccgcgaacccatgcttcagtcagctgatgcacaatcgtttttaaacgggtttgcggtgtaagtgcagcccgtcttacaccgtgcggcacaggcactagtactgatgtcgtatacagggcttttgacatctacaatgataaagtagctggttttgctaaattcctaaaaactaattgttgtcgcttccaagaaaaggacgaagatgacaatttaattgattcttactttgtagttaagagacacactttctctaactaccaacatgaagaaacaatttataatttacttaaggattgtccagctgttgctaaacatgacttctttaagtttagaatagacggtgacatggtaccacatatatcacgtcaacgtcttactaaatacacaatggcagacctcgtctatgctttaaggcattttgatgaaggtaattgtgacacattaaaagaaatacttgtcacatacaattgttgtgatgatgattatttcaataaaaaggactggtatgattttgtagaaaacccagatatattacgcgtatacgccaacttaggtgaacgtgtacgccaagctttgttaaaaacagtacaattctgtgatgccatgcgaaatgctggtattgttggtgtactgacattagataatcaagatctcaatggtaactggtatgatttcggtgatttcatacaaaccacgccaggtagtggagttcctgttgtagattcttattattcattgttaatgcctatattaaccttgaccagggctttaactgcagagtcacatgttgacactgacttaacaaagccttacattaagtgggatttgttaaaatatgacttcacggaagagaggttaaaactctttgaccgttattttaaatattgggatcagacataccacccaaattgtgttaactgtttggatgacagatgcattctgcattgtgcaaactttaatgttttattctctacagtgttcccacttacaagttttggaccactagtgagaaaaatatttgttgatggtgttccatttgtagtttcaactggataccacttcagagagctaggtgttgtacataatcaggatgtaaatttacatagctctagacttagttttaaggaattacttgtgtatgctgctgaccctgctatgcacgctgcttctggtaatctattactagataaacgcactacgtgcttttcagtagctgcacttactaacaatgttgcttttcaaactgtcaaacccggtaattttaacaaagacttctatgactttgctgtgtctaagggtttctttaaggaaggaagttctgttgaattaaaacacttcttctttgctcaggatggtaatgctgctatcagcgattatgactactatcgttataatctaccaacaatgtgtgatatcagacaactactatttgtagttgaagttgttgataagtactttgattgttacgatggtggctgtattaatgctaaccaagtcatcgtcaacaacctagacaaatcagctggttttccatttaataaatggggtaaggctagactttattatgattcaatgagttatgaggatcaagatgcacttttcgcatatacaaaacgtaatgtcatccctactataactcaaatgaatcttaagtatgccattagtgcaaagaatagagctcgcaccgtagctggtgtctctatctgtagtactatgaccaatagacagtttcatcaaaaattattgaaatcaatagccgccactagaggagctactgtagtaattggaacaagcaaattctatggtggttggcacaacatgttaaaaactgtttatagtgatgtagaaaaccctcaccttatgggttgggattatcctaaatgtgatagagccatgcctaacatgcttagaattatggcctcacttgttcttgctcgcaaacatacaacgtgttgtagcttgtcacaccgtttctatagattagctaatgagtgtgctcaagtattgagtgaaatggtcatgtgtggcggttcactatatgttaaaccaggtggaacctcatcaggagatgccacaactgcttatgctaatagtgtttttaacatttgtcaagctgtcacggccaatgttaatgcacttttatctactgatggtaacaaaattgccgataagtatgtccgcaatttacaacacagactttatgagtgtctctatagaaatagagatgttgacacagactttgtgaatgagttttacgcatatttgcgtaaacatttctcaatgatgatactctctgacgatgctgttgtgtgtttcaatagcacttatgcatctcaaggtctagtggctagcataaagaactttaagtcagttctttattatcaaaacaatgtttttatgtctgaagcaaaatgttggactgagactgaccttactaaaggacctcatgaattttgctctcaacatacaatgctagttaaacagggtgatgattatgtgtaccttccttacccagatccatcaagaatcctaggggccggctgttttgtagatgatatcgtaaaaacagatggtacacttatgattgaacggttcgtgtctttagctatagatgcttacccacttactaaacatcctaatcaggagtatgctgatgtctttcatttgtacttacaatacataagaaagctacatgatgagttaacaggacacatgttagacatgtattctgttatgcttactaatgataacacttcaaggtattgggaacctgagttttatgaggctatgtacacaccgcatacagtcttacaggctgttggggcttgtgttctttgcaattcacagacttcattaagatgtggtgcttgcatacgtagaccattcttatgttgtaaatgctgttacgaccatgtcatatcaacatcacataaattagtcttgtctgttaatccgtatgtttgcaatgctccaggttgtgatgtcacagatgtgactcaactttacttaggaggtatgagctattattgtaaatcacataaaccacccattagttttccattgtgtgctaatggacaagtttttggtttatataaaaatacatgtgttggtagcgataatgttactgactttaatgcaattgcaacatgtgactggacaaatgctggtgattacattttagctaacacctgtactgaaagactcaagctttttgcagcagaaacgctcaaagctactgaggagacatttaaactgtcttatggtattgctactgtacgtgaagtgctgtctgacagagaattacatctttcatgggaagttggtaaacctagaccaccacttaaccgaaattatgtctttactggttatcgtgtaactaaaaacagtaaagtacaaataggagagtacacctttgaaaaaggtgactatggtgatgctgttgtttaccgaggtacaacaacttacaaattaaatgttggtgattattttgtgctgacatcacatacagtaatgccattaagtgcacctacactagtgccacaagagcactatgttagaattactggcttatacccaacactcaatatctcagatgagttttctagcaatgttgcaaattatcaaaaggttggtatgcaaaagtattctacactccagggaccacctggtactggtaagagtcattttgctattggcctagctctctactacccttctgctcgcatagtgtatacagcttgctctcatgccgctgttgatgcactatgtgagaaggcattaaaatatttgcctatagataaatgtagtagaattatacctgcacgtgctcgtgtagagtgttttgataaattcaaagtgaattcaacattagaacagtatgtcttttgtactgtaaatgcattgcctgagacgacagcagatatagttgtctttgatgaaatttcaatggccacaaattatgatttgagtgttgtcaatgccagattacgtgctaagcactatgtgtacattggcgaccctgctcaattacctgcaccacgcacattgctaactaagggcacactagaaccagaatatttcaattcagtgtgtagacttatgaaaactataggtccagacatgttcctcggaacttgtcggcgttgtcctgctgaaattgttgacactgtgagtgctttggtttatgataataagcttaaagcacataaagacaaatcagctcaatgctttaaaatgttttataagggtgttatcacgcatgatgtttcatctgcaattaacaggccacaaataggcgtggtaagagaattccttacacgtaaccctgcttggagaaaagctgtctttatttcaccttataattcacagaatgctgtagcctcaaagattttgggactaccaactcaaactgttgattcatcacagggctcagaatatgactatgtcatattcactcaaaccactgaaacagctcactcttgtaatgtaaacagatttaatgttgctattaccagagcaaaagtaggcatactttgcataatgtctgatagagacctttatgacaagttgcaatttacaagtcttgaaattccacgtaggaatgtggcaactttacaagctgaaaatgtaacaggactctttaaagattgtagtaaggtaatcactgggttacatcctacacaggcacctacacacctcagtgttgacactaaattcaaaactgaaggtttatgtgttgacatacctggcatacctaaggacatgacctatagaagactcatctctatgatgggttttaaaatgaattatcaagttaatggttaccctaacatgtttatcacccgcgaagaagctataagacatgtacgtgcatggattggcttcgatgtcgaggggtgtcatgctactagagaagctgttggtaccaatttacctttacagctaggtttttctacaggtgttaacctagttgctgtacctacaggttatgttgatacacctaataatacagatttttccagagttagtgctaaaccaccgcctggagatcaatttaaacacctcataccacttatgtacaaaggacttccttggaatgtagtgcgtataaagattgtacaaatgttaagtgacacacttaaaaatctctctgacagagtcgtatttgtcttatgggcacatggctttgagttgacatctatgaagtattttgtgaaaataggacctgagcgcacctgttgtctatgtgatagacgtgccacatgcttttccactgcttcagacacttatgcctgttggcatcattctattggatttgattacgtctataatccgtttatgattgatgttcaacaatggggttttacaggtaacctacaaagcaaccatgatctgtattgtcaagtccatggtaatgcacatgtagctagttgtgatgcaatcatgactaggtgtctagctgtccacgagtgctttgttaagcgtgttgactggactattgaatatcctataattggtgatgaactgaagattaatgcggcttgtagaaaggttcaacacatggttgttaaagctgcattattagcagacaaattcccagttcttcacgacattggtaaccctaaagctattaagtgtgtacctcaagctgatgtagaatggaagttctatgatgcacagccttgtagtgacaaagcttataaaatagaagaattattctattcttatgccacacattctgacaaattcacagatggtgtatgcctattttggaattgcaatgtcgatagatatcctgctaattccattgtttgtagatttgacactagagtgctatctaaccttaacttgcctggttgtgatggtggcagtttgtatgtaaataaacatgcattccacacaccagcttttgataaaagtgcttttgttaatttaaaacaattaccatttttctattactctgacagtccatgtgagtctcatggaaaacaagtagtgtcagatatagattatgtaccactaaagtctgctacgtgtataacacgttgcaatttaggtggtgctgtctgtagacatcatgctaatgagtacagattgtatctcgatgcttataacatgatgatctcagctggctttagcttgtgggtttacaaacaatttgatacttataacctctggaacacttttacaagacttcagagtttagaaaatgtggcttttaatgttgtaaataagggacactttgatggacaacagggtgaagtaccagtttctatcattaataacactgtttacacaaaagttgatggtgttgatgtagaattgtttgaaaataaaacaacattacctgttaatgtagcatttgagctttgggctaagcgcaacattaaaccagtaccagaggtgaaaatactcaataatttgggtgtggacattgctgctaatactgtgatctgggactacaaaagagatgctccagcacatatatctactattggtgtttgttctatgactgacatagccaagaaaccaactgaaacgatttgtgcaccactcactgtcttttttgatggtagagttgatggtcaagtagacttatttagaaatgcccgtaatggtgttcttattacagaaggtagtgttaaaggtttacaaccatctgtaggtcccaaacaagctagtcttaatggagtcacattaattggagaagccgtaaaaacacagttcaattattataagaaagttgatggtgttgtccaacaattacctgaaacttactttactcagagtagaaatttacaagaatttaaacccaggagtcaaatggaaattgatttcttagaattagctatggatgaattcattgaacggtataaattagaaggctatgccttcgaacatatcgtttatggagattttagtcatagtcagttaggtggtttacatctactgattggactagctaaacgttttaaggaatcaccttttgaattagaagattttattcctatggacagtacagttaaaaactatttcataacagatgcgcaaacaggttcatctaagtgtgtgtgttctgttattgatttattacttgatgattttgttgaaataataaaatcccaagatttatctgtagtttctaaggttgtcaaagtgactattgactatacagaaatttcatttatgctttggtgtaaagatggccatgtagaaacattttacccaaaattacaatctagtcaagcgtggcaaccgggtgttgctatgcctaatctttacaaaatgcaaagaatgctattagaaaagtgtgaccttcaaaattatggtgatagtgcaacattacctaaaggcataatgatgaatgtcgcaaaatatactcaactgtgtcaatatttaaacacattaacattagctgtaccctataatatgagagttatacattttggtgctggttctgataaaggagttgcaccaggtacagctgttttaagacagtggttgcctacgggtacgctgcttgtcgactcagatcttaatgactttgtctctgatgcagattcaactttgattggtgattgtgcaactgtacatacagctaataaatgggatctcattattagtgatatgtacgaccctaagactaaaaatgttacaaaagaaaatgactctaaagagggttttttcacttacatttgtgggtttatacaacaaaagctagctcttggaggttccgtggctataaagataacagaacattcttggaatgctgatctttataagctcatgggacacttcgcatggtggacagcctttgttactaatgtgaatgcgtcatcatctgaagcatttttaattggatgtaattatcttggcaaaccacgcgaacaaatagatggttatgtcatgcatgcaaattacatattttggaggaatacaaatccaattcagttgtcttcctattctttatttgacatgagtaaatttccccttaaattaaggggtactgctgttatgtctttaaaagaaggtcaaatcaatgatatgattttatctcttcttagtaaaggtagacttataattagagaaaacaacagagttgttatttctagtgatgttcttgttaacaactaaacgaacaatgtttgtttttcttgttttattgccactagtctctagtcagtgtgttaatcttacaaccagaactcaattaccccctgcatacactaattctttcacacgtggtgtttattaccctgacaaagttttcagatcctcagttttacattcaactcaggacttgttcttacctttcttttccaatgttacttggttccatgctatacatgtctctgggaccaatggtactaagaggtttgataaccctgtcctaccatttaatgatggtgtttattttgcttccactgagaagtctaacataataagaggctggatttttggtactactttagattcgaagacccagtccctacttattgttaataacgctactaatgttgttattaaagtctgtgaatttcaattttgtaatgatccatttttgggtgtttattaccacaaaaacaacaaaagttggatggaaagtgagttcagagtttattctagtgcgaataattgcacttttgaatatgtctctcagccttttcttatggaccttgaaggaaaacagggtaatttcaaaaatcttagggaatttgtgtttaagaatattgatggttattttaaaatatattctaagcacacgcctattaatttagtgcgtgatctccctcagggtttttcggctttagaaccattggtagatttgccaataggtattaacatcactaggtttcaaactttacttgctttacatagaagttatttgactcctggtgattcttcttcaggttggacagctggtgctgcagcttattatgtgggttatcttcaacctaggacttttctattaaaatataatgaaaatggaaccattacagatgctgtagactgtgcacttgaccctctctcagaaacaaagtgtacgttgaaatccttcactgtagaaaaaggaatctatcaaacttctaactttagagtccaaccaacagaatctattgttagatttcctaatattacaaacttgtgcccttttggtgaagtttttaacgccaccagatttgcatctgtttatgcttggaacaggaagagaatcagcaactgtgttgctgattattctgtcctatataattccgcatcattttccacttttaagtgttatggagtgtctcctactaaattaaatgatctctgctttactaatgtctatgcagattcatttgtaattagaggtgatgaagtcagacaaatcgctccagggcaaactggaaagattgctgattataattataaattaccagatgattttacaggctgcgttatagcttggaattctaacaatcttgattctaaggttggtggtaattataattacctgtatagattgtttaggaagtctaatctcaaaccttttgagagagatatttcaactgaaatctatcaggccggtagcacaccttgtaatggtgttgaaggttttaattgttactttcctttacaatcatatggtttccaacccactaatggtgttggttaccaaccatacagagtagtagtactttcttttgaacttctacatgcaccagcaactgtttgtggacctaaaaagtctactaatttggttaaaaacaaatgtgtcaatttcaacttcaatggtttaacaggcacaggtgttcttactgagtctaacaaaaagtttctgcctttccaacaatttggcagagacattgctgacactactgatgctgtccgtgatccacagacacttgagattcttgacattacaccatgttcttttggtggtgtcagtgttataacaccaggaacaaatacttctaaccaggttgctgttctttatcagggtgttaactgcacagaagtccctgttgctattcatgcagatcaacttactcctacttggcgtgtttattctacaggttctaatgtttttcaaacacgtgcaggctgtttaataggggctgaacatgtcaacaactcatatgagtgtgacatacccattggtgcaggtatatgcgctagttatcagactcagactaattctcctcggcgggcacgtagtgtagctagtcaatccatcattgcctacactatgtcacttggtgcagaaaattcagttgcttactctaataactctattgccatacccacaaattttactattagtgttaccacagaaattctaccagtgtctatgaccaagacatcagtagattgtacaatgtacatttgtggtgattcaactgaatgcagcaatcttttgttgcaatatggcagtttttgtacacaattaaaccgtgctttaactggaatagctgttgaacaagacaaaaacacccaagaagtttttgcacaagtcaaacaaatttacaaaacaccaccaattaaagattttggtggttttaatttttcacaaatattaccagatccatcaaaaccaagcaagaggtcatttattgaagatctacttttcaacaaagtgacacttgcagatgctggcttcatcaaacaatatggtgattgccttggtgatattgctgctagagacctcatttgtgcacaaaagtttaacggccttactgttttgccacctttgctcacagatgaaatgattgctcaatacacttctgcactgttagcgggtacaatcacttctggttggacctttggtgcaggtgctgcattacaaataccatttgctatgcaaatggcttataggtttaatggtattggagttacacagaatgttctctatgagaaccaaaaattgattgccaaccaatttaatagtgctattggcaaaattcaagactcactttcttccacagcaagtgcacttggaaaacttcaagatgtggtcaaccaaaatgcacaagctttaaacacgcttgttaaacaacttagctccaattttggtgcaatttcaagtgttttaaatgatatcctttcacgtcttgacaaagttgaggctgaagtgcaaattgataggttgatcacaggcagacttcaaagtttgcagacatatgtgactcaacaattaattagagctgcagaaatcagagcttctgctaatcttgctgctactaaaatgtcagagtgtgtacttggacaatcaaaaagagttgatttttgtggaaagggctatcatcttatgtccttccctcagtcagcacctcatggtgtagtcttcttgcatgtgacttatgtccctgcacaagaaaagaacttcacaactgctcctgccatttgtcatgatggaaaagcacactttcctcgtgaaggtgtctttgtttcaaatggcacacactggtttgtaacacaaaggaatttttatgaaccacaaatcattactacagacaacacatttgtgtctggtaactgtgatgttgtaataggaattgtcaacaacacagtttatgatcctttgcaacctgaattagactcattcaaggaggagttagataaatattttaagaatcatacatcaccagatgttgatttaggtgacatctctggcattaatgcttcagttgtaaacattcaaaaagaaattgaccgcctcaatgaggttgccaagaatttaaatgaatctctcatcgatctccaagaacttggaaagtatgagcagtatataaaatggccatggtacatttggctaggttttatagctggcttgattgccatagtaatggtgacaattatgctttgctgtatgaccagttgctgtagttgtctcaagggctgttgttcttgtggatcctgctgcaaatttgatgaagacgactctgagccagtgctcaaaggagtcaaattacattacacataaacgaacttatggatttgtttatgagaatcttcacaattggaactgtaactttgaagcaaggtgaaatcaaggatgctactccttcagattttgttcgcgctactgcaacgataccgatacaagcctcactccctttcggatggcttattgttggcgttgcacttcttgctgtttttcagagcgcttccaaaatcataaccctcaaaaagagatggcaactagcactctccaagggtgttcactttgtttgcaacttgctgttgttgtttgtaacagtttactcacaccttttgctcgttgctgctggccttgaagccccttttctctatctttatgctttagtctacttcttgcagagtataaactttgtaagaataataatgaggctttggctttgctggaaatgccgttccaaaaacccattactttatgatgccaactattttctttgctggcatactaattgttacgactattgtataccttacaatagtgtaacttcttcaattgtcattacttcaggtgatggcacaacaagtcctatttctgaacatgactaccagattggtggttatactgaaaaatgggaatctggagtaaaagactgtgttgtattacacagttacttcacttcagactattaccagctgtactcaactcaattgagtacagacactggtgttgaacatgttaccttcttcatctacaataaaattgttgatgagcctgaagaacatgtccaaattcacacaatcgacggttcatccggagttgttaatccagtaatggaaccaatttatgatgaaccgacgacgactactagcgtgcctttgtaagcacaagctgatgagtacgaacttatgtactcattcgtttcggaagagacaggtacgttaatagttaatagcgtacttctttttcttgctttcgtggtattcttgctagttacactagccatccttactgcgcttcgattgtgtgcgtactgctgcaatattgttaacgtgagtcttgtaaaaccttctttttacgtttactctcgtgttaaaaatctgaattcttctagagttcctgatcttccggtctaaacgaactaaatattatattagtttttctgtttggaactttaattttagccatggcagattccaacggtactattaccgttgaagagcttaaaaagctccttgaacaatggaacctagtaataggtttcctattccttacatggatttgtcttctacaatttgcctatgccaacaggaataggtttttgtatataattaagttaattttcctctggctgttatggccagtaactttagcttgttttgtgcttgctgctgtttacagaataaattggatcaccggtggaattgctatcgcaatggcttgtcttgtaggcttgatgtggctcagctacttcattgcttctttcagactgtttgcgcgtacgcgttccatgtggtcattcaatccagaaactaacattcttctcaacgtgccactccatggcactattctgaccagaccgcttctagaaagtgaactcgtaatcggagctgtgatccttcgtggacatcttcgtattgctggacaccatctaggacgctgtgacatcaaggacctgcctaaagaaatcactgttgctacatcacgaacgctttcttattacaaattgggagcttcgcagcgtgtagcaggtgactcaggttttgctgcatacagtcgctacaggattggcaactataaattaaacacagaccattccagtagcagtgacaatattgctttgcttgtacagtaagtgacaacagatgtttcatctcgttgactttcaggttactatagcagagatattactaattattatgaggacttttaaagtttccatttggaatcttgattacatcataaacctcataattaaaaatttatctaagtcactaactgagaataaatattctcaattagatgaagagcaaccaatggagattgattaaacgaacatgaaaattattcttttcttggcactgataacactcgctacttgtgagctttatcactaccaagagtgtgttagaggtacaacagtacttttaaaagaaccttgctcttctggaacatacgagggcaattcaccatttcatcctctagctgataacaaatttgcactgacttgctttagcactcaatttgcttttgcttgtcctgacggcgtaaaacacgtctatcagttacgtgccagatcagtttcacctaaactgttcatcagacaagaggaagttcaagaactttactctccaatttttcttattgttgcggcaatagtgtttataacactttgcttcacactcaaaagaaagacagaatgattgaactttcattaattgacttctatttgtgctttttagcctttctgctattccttgttttaattatgcttattatcttttggttctcacttgaactgcaagatcataatgaaacttgtcacgcctaaacgaacatgaaatttcttgttttcttaggaatcatcacaactgtagctgcatttcaccaagaatgtagtttacagtcatgtactcaacatcaaccatatgtagttgatgacccgtgtcctattcacttctattctaaatggtatattagagtaggagctagaaaatcagcacctttaattgaattgtgcgtggatgaggctggttctaaatcacccattcagtacatcgatatcggtaattatacagtttcctgtttaccttttacaattaattgccaggaacctaaattgggtagtcttgtagtgcgttgttcgttctatgaagactttttagagtatcatgacgttcgtgttgttttagatttcatctaaacgaacaaactaaaatgtctgataatggaccccaaaatcagcgaaatgcaccccgcattacgtttggtggaccctcagattcaactggcagtaaccagaatggagaacgcagtggggcgcgatcaaaacaacgtcggccccaaggtttacccaataatactgcgtcttggttcaccgctctcactcaacatggcaaggaagaccttaaattccctcgaggacaaggcgttccaattaacaccaatagcagtccagatgaccaaattggctactaccgaagagctaccagacgaattcgtggtggtgacggtaaaatgaaagatctcagtccaagatggtatttctactacctaggaactgggccagaagctggacttccctatggtgctaacaaagacggcatcatatgggttgcaactgagggagccttgaatacaccaaaagatcacattggcacccgcaatcctgctaacaatgctgcaatcgtgctacaacttcctcaaggaacaacattgccaaaaggcttctacgcagaagggagcagaggcggcagtcaagcctcttctcgttcctcatcacgtagtcgcaacagttcaagaaattcaactccaggcagcagtaggggaacttctcctgctagaatggctggcaatggcggtgatgctgctcttgctttgctgctgcttgacagattgaaccagcttgagagcaaaatgtctggtaaaggccaacaacaacaaggccaaactgtcactaagaaatctgctgctgaggcttctaagaagcctcggcaaaaacgtactgccactaaagcatacaatgtaacacaagctttcggcagacgtggtccagaacaaacccaaggaaattttggggaccaggaactaatcagacaaggaactgattacaaacattggccgcaaattgcacaatttgcccccagcgcttcagcgttcttcggaatgtcgcgcattggcatggaagtcacaccttcgggaacgtggttgacctacacaggtgccatcaaattggatgacaaagatccaaatttcaaagatcaagtcattttgctgaataagcatattgacgcatacaaaacattcccaccaacagagcctaaaaaggacaaaaagaagaaggctgatgaaactcaagccttaccgcagagacagaagaaacagcaaactgtgactcttcttcctgctgcagatttggatgatttctccaaacaattgcaacaatccatgagcagtgctgactcaactcaggcctaaactcatgcagaccacacaaggcagatgggctatataaacgttttcgcttttccgtttacgatatatagtctactcttgtgcagaatgaattctcgtaactacatagcacaagtagatgtagttaactttaatctcacatagcaatctttaatcagtgtgtaacattagggaggacttgaaagagccaccacattttcaccgaggc

SEQ ID NO: 40 - DNA, 29729 bp, synthetic construct
  misc_feature 1..29729: note = Reconstituted virus 3
  source 1..29729: mol_type = other DNA
tttataccttcccaggtaacaaaccaaccaactttcgatctcttgtagatctgttctctaaacgaactttaaaatctgtgtggctgtcactcggctgcatgcttagtgcactcacgcagtataattaataactaattactgtcgttgacaggacacgagtaactcgtctatcttctgcaggctgcttacggtttcgtccgtgttgcagccgatcatcagcacatctaggttttgtccgggtgtgaccgaaaggtaagatggagagccttgtccctggtttcaacgagaaaacacacgtccaactcagtttgcctgttttacaggttcgcgacgtgctcgtacgtggctttggagactccgtggaggaggtcttatcagaggcacgtcaacatcttaaagatggcacttgtggcttagtagaagttgaaaaaggcgttttgcctcaacttgaacagccctatgtgttcatcaaacgttcggatgctcgaactgcacctcatggtcatgttatggttgagctggtagcagaactcgaaggcattcagtacggtcgtagtggtgagacacttggtgtccttgtccctcatgtgggcgaaataccagtggcttaccgcaaggttcttcttcgtaagaacggtaataaaggagctggtggccatagttacggcgccgatctaaagtcatttgacttaggcgacgagcttggcactgatccttatgaagattttcaagaaaactggaacactaaacatagcagtggtgttacccgtgaactcatgcgtgagcttaacggaggggcatacactcgctatgtcgataacaacttctgtggccctgatggctaccctcttgagtgcattaaagaccttctagcacgtgctggtaaagcttcatgcactttgtccgaacaactggactttattgacactaagaggggtgtatactgctgccgtgaacatgagcatgaaattgcttggtacacggaacgttctgaaaagagctatgaattgcagacaccttttgaaattaaattggcaaagaaatttgacaccttcaatggggaatgtccaaattttgtatttcccttaaattccataatcaagactattcaaccaagggttgaaaagaaaaagcttgatggctttatgggtagaattcgatctgtctatccagttgcgtcaccaaatgaatgcaaccaaatgtgcctttcaactctcatgaagtgtgatcattgtggtgaaacttcatggcagacgggcgattttgttaaagccacttgcgaattttgtggcactgagaatttgactaaagaaggtgccactacttgtggttacttaccccaaaatgctgttgttaaaatttattgtccagcatgtcacaattcagaagtaggacctgagcatagtcttgccgaataccataatgaatctggcttgaaaaccattcttcgtaagggtggtcgcactattgcctttggaggctgtgtgttctcttatgttggttgccataacaagtgtgcctattgggttccacgtgctagcgctaacataggttgtaaccatacaggtgttgttggagaaggttccgaaggtcttaatgacaaccttcttgaaatactccaaaaagagaaagtcaacatcaatattgttggtgactttaaacttaatgaagagatcgccattattttggcatctttttctgcttccacaagtgcttttgtggaaactgtgaaaggtttggattataaagcattcaaacaaattgttgaatcctgtggtaattttaaagttacaaaaggaaaagctaaaaaaggtgcctggaatattggtgaacagaaatcaatactgagtcctctttatgcatttgcatcagaggctgctcgtgttgtacgatcaattttctcccgcactcttgaaactgctcaaaattctgtgcgtgttttacagaaggccgctataacaatactagatggaatttcacagtattcactgagactcattgatgctatgatgttcacatctgatttggctactaacaatctagttgtaatggcctacattacaggtggtgttgttcagttgacttcgcagtggctaactaacatctttggcactgtttatgaaaaactcaaacccgtccttgattggcttgaagagaagtttaaggaaggtgtagagtttcttagagacggttgggaaattgttaaatttatctcaacctgtgcttgtgaaattgtcggtggacaaattgtcacctgtgcaaaggaaattaaggagagtgttcagacattctttaagcttgtaaataaatttttggctttgtgtgctgactctatcattattggtggagctaaacttaaagccttgaatttaggtgaaacatttgtcacgcactcaaagggattgtacagaaagtgtgttaaatccagagaagaaactggcctactcatgcctctaaaagccccaaaagaaattatcttcttagagggagaaacacttcccacagaagtgttaacagaggaagttgtcttgaaaactggtgatttacaaccattagaacaacctactagtgaagctgttgaagctccattggttggtacaccagtttgtattaacgggcttatgttgctcgaaatcaaagacacagaaaagtactgtgcccttgcacctaatatgatggtaacaaacaataccttcacactcaaaggcggtgcaccaacaaaggttacttttggtgatgacactgtgatagaagtgcaaggttacaagagtgtgaatatcacttttgaacttgatgaaaggattgataaagtacttaatgagaagtgctctgcctatacagttgaactcggtacagaagtaaatgagttcgcctgtgttgtggcagatgctgtcataaaaactttgcaaccagtatctgaattacttacaccactgggcattgatttagatgagtggagtatggctacatactacttatttgatgagtctggtgagtttaaattggcttcacatatgtattgttctttttaccctccagatgaggatgaagaagaaggtgattgtgaagaagaagagtttgagccatcaactcaatatgagtatggtactgaagatgattaccaaggtaaacctttggaatttggtgccacttctgctgctcttcaacctgaagaagagcaagaagaagattggttagatgatgatagtcaacaaactgttggtcaacaagacggcagtgaggacaatcagacaactactattcaaacaattgttgaggttcaacctcaattagagatggaacttacaccagttgttcagactattgaagtgaatagttttagtggttatttaaaacttactgacaatgtatacattaaaaatgcagacattgtggaagaagctaaaaaggtaaaaccaacagtggttgttaatgcagccaatgtttaccttaaacatggaggaggtgttgcaggagccttaaataaggctactaacaatgccatgcaagttgaatctgatgattacatagctactaatggaccacttaaagtgggtggtagttgtgttttaagcggacacaatcttgctaaacactgtcttcatgttgtcggcccaaatgttaacaaaggtgaagacattcaacttcttaagagtgcttatgaaaattttaatcagcacgaagttctacttgcaccattattatcagctggtatttttggtgctgaccctatacattctttaagagtttgtgtagatactgttcgcacaaatgtctacttagctgtctttgataaaaatctctatgacaaacttgtttcaagctttttggaaatgaagagtgaaaagcaagttgaacaaaagatcgctgagattcctaaagaggaagttaagccatttataactgaaagtaaaccttcagttgaacagagaaaacaagatgataagaaaatcaaagcttgtgttgaagaagttacaacaactctggaagaaactaagttcctcacagaaaacttgttactttatattgacattaatggcaatcttcatccagattctgccactcttgttagtgacattgacatcactttcttaaagaaagatgctccatatatagtgggtgatgttgttcaagagggtgttttaactgctgtggttatacctactaaaaaggctggtggcactactgaaatgctagcgaaagctttgagaaaagtgccaacagacaattatataaccacttacccgggtcagggtttaaatggttacactgtagaggaggcaaagacagtgcttaaaaagtgtaaaagtgccttttacattctaccatctattatctctaatgagaagcaagaaattcttggaactgtttcttggaatttgcgagaaatgcttgcacatgcagaagaaacacgcaaattaatgcctgtctgtgtggaaactaaagccatagtttcaactatacagcgtaaatataagggtattaaaatacaagagggtgtggttgattatggtgctagattttacttttacaccagtaaaacaactgtagcgtcacttatcaacacacttaacgatctaaatgaaactcttgttacaatgccacttggctatgtaacacatggcttaaatttggaagaagctgctcggtatatgagatctctcaaagtgccagctacagtttctgtttcttcacctgatgctgttacagcgtataatggttatcttacttcttcttctaaaacacctgaagaacattttattgaaaccatctcacttgctggttcctataaagattggtcctattctggacaatctacacaactaggtatagaatttcttaagagaggtgataaaagtgtatattacactagtaatcctaccacattccacctagatggtgaagttatcacctttgacaatcttaagacacttctttctttgagagaagtgaggactattaaggtgtttacaacagtagacaacattaacctccacacgcaagttgtggacatgtcaatgacatatggacaacagtttggtccaacttatttggatggagctgatgttactaaaataaaacctcataattcacatgaaggtaaaacattttatgttttacctaatgatgacactctacgtgttgaggcttttgagtactaccacacaactgatcctagttttctgggtaggtacatgtcagcattaaatcacactaaaaagtggaaatacccacaagttaatggtttaacttctattaaatgggcagataacaactgttatcttgccactgcattgttaacactccaacaaatagagttgaagtttaatccacctgctctacaagatgcttattacagagcaagggctggtgaagctgctaacttttgtgcacttatcttagcctactgtaataagacagtaggtgagttaggtgatgttagagaaacaatgagttacttgtttcaaaatgccaatttagattcttgcaaaagagtcttgaacgtggtgtgtaaaacttgtggacaacagcagacaacccttaagggtgtagaagctgttatgtacatgggcacactttcttatgaacaatttaagaaaggtgttcagataccttgtacgtgtggtaaacaagctacaaaatatctagtacaacaggagtcaccttttgttatgatgtcagcaccacctgctcagtatgaacttaagcatggtacatttacttgtgctagtgagtacactggtaattaccagtgtggtcactataaacatataacttctaaagaaactttgtattgcatagacggtgctttacttacaaagtcctcagaatacaaaggtcctattacggatgttttctacaaagaaaacagttacacaacaaccataaaaccagttacttataaattggatggtgttgtttgtacagaaattgaccctaagttggacaattattataagaaagacaattcttatttcacagagcaaccaattgatcttgtaccaaaccaaccatatccaaacgcaagcttcgataattttaagtttgtatgtgataatatcaaatttgctgatgatttaaaccagttaactggttataagaaacctgcttcaagagagcttaaagttacatttttccctgacttaaatggtgatgtggtggctattgattataaacactacacaccctcttttaagaaaggagctaaattgttacataaacctattgtttggcatgttaacaatgcaactaataaagccacgtataaaccaaatacctggtgtatacgttgtctttggagcacaaaaccagttgaaacatcaaattcgtttgatgtactgaagtcagaggacgcgcagggaatggataatcttgcctgcgaagatctaaaaccagtctctgaagaagtagtggaaaatcctaccatacagaaagacgttcttgagtgtaatgtgaaaactaccgaagttgtaggagacattatacttaaaccagcaaataatagtttaaaaattacagaagaggttggccacacagatctaatggctgcttatgtagacaattctagtcttactattaagaaacctaatgaattatctagagtattaggtttgaaaacccttgctactcatggtttagctgctgttaatagtgtcccttgggatactatagctaattatgctaagccttttcttaacaaagttgttagtacaactactaacatagttacacggtgtttaaaccgtgtttgtactaattatatgccttatttctttactttattgctacaattgtgtacttttactagaagtacaaattctagaattaaagcatctatgccgactactatagcaaagaatactgttaagagtgtcggtaaattttgtctagaggcttcatttaattatttgaagtcacctaatttttctaaactgataaatattataatttggtttttactattaagtgtttgcctaggttctttaatctactcaaccgctgctttaggtgttttaatgtctaatttaggcatgccttcttactgtactggttacagagaaggctatttgaactctactaatgtcactattgcaacctactgtactggttctataccttgtagtgtttgtcttagtggtttagattctttagacacctatccttctttagaaactatacaaattaccatttcatcttttaaatgggatttaactgcttttggcttagttgcagagtggtttttggcatatattcttttcactaggtttttctatgtacttggattggctgcaatcatgcaattgtttttcagctattttgcagtacattttattagtaattcttggcttatgtggttaataattaatcttgtacaaatggccccgatttcagctatggttagaatgtacatcttctttgcatcattttattatgtatggaaaagttatgtgcatgttgtagacggttgtaattcatcaacttgtatgatgtgttacaaacgtaatagagcaacaagagtcgaatgtacaactattgttaatggtgttagaaggtccttttatgtctatgctaatggaggtaaaggcttttgcaaactacacaattggaattgtgttaattgtgatacattctgtgctggtagtacatttattagtgatgaagttgcgagagacttgtcactacagtttaaaagaccaataaatcctactgaccagtcttcttacatcgttgatagtgttacagtgaagaatggttccatccatctttactttgataaagctggtcaaaagacttatgaaagacattctctctctcattttgttaacttagacaacctgagagctaataacactaaaggttcattgcctattaatgttatagtttttgatggtaaatcaaaatgtgaagaatcatctgcaaaatcagcgtctgtttactacagtcagcttatgtgtcaacctatactgttactagatcaggcattagtgtctgatgttggtgatagtgcggaagttgcagttaaaatgtttgatgcttacgttaatacgttttcatcaacttttaacgtaccaatggaaaaactcaaaacactagttgcaactgcagaagctgaacttgcaaagaatgtgtccttagacaatgtcttatctacttttatttcagcagctcggcaagggtttgttgattcagatgtagaaactaaagatgttgttgaatgtcttaaattgtcacatcaatctgacatagaagttactggcgatagttgtaataactatatgctcacctataacaaagttgaaaacatgacaccccgtgaccttggtgcttgtattgactgtagtgcgcgtcatattaatgcgcaggtagcaaaaagtcacaacattgctttgatatggaacgttaaagatttcatgtcattgtctgaacaactacgaaaacaaatacgtagtgctgctaaaaagaataacttaccttttaagttgacatgtgcaactactagacaagttgttaatgttgtaacaacaaagatagcacttaagggtggtaaaattgttaataattggttgaagcagttaattaaagttacacttgtgttcctttttgttgctgctattttctatttaataacacctgttcatgtcatgtctaaacatactgacttttcaagtgaaatcataggatacaaggctattgatggtggtgtcactcgtgacatagcatctacagatacttgttttgctaacaaacatgctgattttgacacatggtttagccagcgtggtggtagttatactaatgacaaagcttgcccattgattgctgcagtcataacaagagaagtgggttttgtcgtgcctggtttgcctggcacgatattacgcacaactaatggtgactttttgcatttcttacctagagtttttagtgcagttggtaacatctgttacacaccatcaaaacttatagagtacactgactttgcaacatcagcttgtgttttggctgctgaatgtacaatttttaaagatgcttctggtaagccagtaccatattgttatgataccaatgtactagaaggttctgttgcttatgaaagtttacgccctgacacacgttatgtgctcatggatggctctattattcaatttcctaacacctaccttgaaggttctgttagagtggtaacaacttttgattctgagtactgtaggcacggcacttgtgaaagatcagaagctggtgtttgtgtatctactagtggtagatgggtacttaacaatgattattacagatctttaccaggagttttctgtggtgtagatgctgtaaatttacttactaatatgtttacaccactaattcaacctattggtgctttggacatatcagcatctatagtagctggtggtattgtagctatcgtagtaacatgccttgcctactattttatgaggtttagaagagcttttggtgaatacagtcatgtagttgcctttaatactttactattccttatgtcattcactgtactctgtttaacaccagtttactcattcttacctggtgtttattctgttatttacttgtacttgacattttatcttactaatgatgtttcttttttagcacatattcagtggatggttatgttcacacctttagtacctttctggataacaattgcttatatcatttgtatttccacaaagcatttctattggttctttagtaattacctaaagagacgtgtagtctttaatggtgtttcctttagtacttttgaagaagctgcgctgtgcacctttttgttaaataaagaaatgtatctaaagttgcgtagtgatgtgctattacctcttacgcaatataatagatacttagctctttataataagtacaagtattttagtggagcaatggatacaactagctacagagaagctgcttgttgtcatctcgcaaaggctctcaatgacttcagtaactcaggttctgatgttctttaccaaccaccacaaacctctatcacctcagctgttttgcagagtggttttagaaaaatggcattcccatctggtaaagttgagggttgtatggtacaagtaacttgtggtacaactacacttaacggtctttggcttgatgacgtagtttactgtccaagacatgtgatctgcacctctgaagacatgcttaaccctaattatgaagatttactcattcgtaagtctaatcataatttcttggtacaggctggtaatgttcaactcagggttattggacattctatgcaaaattgtgtacttaagcttaaggttgatacagccaatcctaagacacctaagtataagtttgttcgcattcaaccaggacagactttttcagtgttagcttgttacaatggttcaccatctggtgtttaccaatgtgctatgaggcccaatttcactattaagggttcattccttaatggttcatgtggtagtgttggttttaacatagattatgactgtgtctctttttgttacatgcaccatatggaattaccaactggagttcatgctggcacagacttagaaggtaacttttatggaccttttgttgacaggcaaacagcacaagcagctggtacggacacaactattacagttaatgttttagcttggttgtacgctgctgttataaatggagacaggtggtttctcaatcgatttaccacaactcttaatgactttaaccttgtggctatgaagtacaattatgaacctctaacacaagaccatgttgacatactaggacctctttctgctcaaactggaattgccgttttagatatgtgtgcttcattaaaagaattactgcaaaatggtatgaatggacgtaccatattgggtagtgctttattagaagatgaatttacaccttttgatgttgttagacaatgctcaggtgttactttccaaagtgcagtgaaaagaacaatcaagggtacacaccactggttgttactcacaattttgacttcacttttagttttagtccagagtactcaatggtctttgttcttttttttgtatgaaaatgcctttttaccttttgctatgggtattattgctatgtctgcttttgcaatgatgtttgtcaaacataagcatgcatttctctgtttgtttttgttaccttctcttgccactgtagcttattttaatatggtctatatgcctgctagttgggtgatgcgtattatgacatggttggatatggttgatactagtttgtctggttttaagctaaaagactgtgttatgtatgcatcagctgtagtgttactaatccttatgacagcaagaactgtgtatgatgatggtgctaggagagtgtggacacttatgaatgtcttgacactcgtttataaagtttattatggtaatgctttagatcaagccatttccatgtgggctcttataatctctgttacttctaactactcaggtgtagttacaactgtcatgtttttggccagaggtattgtttttatgtgtgttgagtattgccctattttcttcataactggtaatacacttcagtgtataatgctagtttattgtttcttaggctatttttgtacttgttactttggcctcttttgtttactcaaccgctactttagactgactcttggtgtttatgattacttagtttctacacaggagtttagatatatgaattcacagggactactcccacccaagaatagcatagatgccttcaaactcaacattaaattgttgggtgttggtggcaaaccttgtatcaaagtagccactgtacagtctaaaatgtcagatgtaaagtgcacatcagtagtcttactctcagttttgcaacaactcagagtagaatcatcatctaaattgtgggctcaatgtgtccagttacacaatgacattctcttagctaaagatactactgaagcctttgaaaaaatggtttcactactttctgttttgctttccatgcagggtgctgtagacataaacaagctttgtgaagaaatgctggacaacagggcaaccttacaagctatagcctcagagtttagttcccttccatcatatgcagcttttgctactgctcaagaagcttatgagcaggctgttgctaatggtgattctgaagttgttcttaaaaagttgaagaagtctttgaatgtggctaaatctgaatttgaccgtgatgcagccatgcaacgtaagttggaaaagatggctgatcaagctatgacccaaatgtataaacaggctagatctgaggacaagagggcaaaagttactagtgctatgcagacaatgcttttcactatgcttagaaagttggataatgatgcactcaacaacattatcaacaatgcaagagatggttgtgttcccttgaacataatacctcttacaacagcagccaaactaatggttgtcataccagactataacacatataaaaatacgtgtgatggtacaacatttacttatgcatcagcattgtgggaaatccaacaggttgtagatgcagatagtaaaattgttcaacttagtgaaattagtatggacaattcacctaatttagcatggcctcttattgtaacagctttaagggccaattctgctgtcaaattacagaataatgagcttagtcctgttgcactacgacagatgtcttgtgctgccggtactacacaaactgcttgcactgatgacaatgcgttagcttactacaacacaacaaagggaggtaggtttgtacttgcactgttatccgatttacaggatttgaaatgggctagattccctaagagtgatggaactggtactatctatacagaactggaaccaccttgtaggtttgttacagacacacctaaaggtcctaaagtgaagtatttatactttattaaaggattaaacaacctaaatagaggtatggtacttggtagtttagctgccacagtacgtctacaagctggtaatgcaacagaagtgcctgccaattcaactgtattatctttctgtgcttttgctgtagatgctgctaaagcttacaaagattatctagctagtgggggacaaccaatcactaattgtgttaagatgttgtgtacacacactggtactggtcaggcaataacagttacaccggaagccaatatggatcaagaatcctttggtggtgcatcgtgttgtctgtactgccgttgccacatagatcatccaaatcctaaaggattttgtgacttaaaaggtaagtatgtacaaatacctacaacttgtgctaatgaccctgtgggttttacacttaaaaacacagtctgtaccgtctgcggtatgtggaaaggttatggctgtagttgtgatcaactccgcgaacccatgcttcagtcagctgatgcacaatcgtttttaaacgggtttgcggtgtaagtgcagcccgtcttacaccgtgcggcacaggcactagtactgatgtcgtatacagggcttttgacatctacaatgataaagtagctggttttgctaaattcctaaaaactaattgttgtcgcttccaagaaaaggacgaagatgacaatttaattgattcttactttgtagttaagagacacactttctctaactaccaacatgaagaaacaatttataatttacttaaggattgtccagctgttgctaaacatgacttctttaagtttagaatagacggtgacatggtaccacatatatcacgtcaacgtcttactaaatacacaatggcagacctcgtctatgctttaaggcattttgatgaaggtaattgtgacacattaaaagaaatacttgtcacatacaattgttgtgatgatgattatttcaataaaaaggactggtatgattttgtagaaaacccagatatattacgcgtatacgccaacttaggtgaacgtgtacgccaagctttgttaaaaacagtacaattctgtgatgccatgcgaaatgctggtattgttggtgtactgacattagataatcaagatctcaatggtaactggtatgatttcggtgatttcatacaaaccacgccaggtagtggagttcctgttgtagattcttattattcattgttaatgcctatattaaccttgaccagggctttaactgcagagtcacatgttgacactgacttaacaaagccttacattaagtgggatttgttaaaatatgacttcacggaagagaggttaaaactctttgaccgttattttaaatattgggatcagacataccacccaaattgtgttaactgtttggatgacagatgcattctgcattgtgcaaactttaatgttttattctctacagtgttcccacttacaagttttggaccactagtgagaaaaatatttgttgatggtgttccatttgtagtttcaactggataccacttcagagagctaggtgttgtacataatcaggatgtaaatttacatagctctagacttagttttaaggaattacttgtgtatgctgctgaccctgctatgcacgctgcttctggtaatctattactagataaacgcactacgtgcttttcagtagctgcacttactaacaatgttgcttttcaaactgtcaaacccggtaattttaacaaagacttctatgactttgctgtgtctaagggtttctttaaggaaggaagttctgttgaattaaaacacttcttctttgctcaggatggtaatgctgctatcagcgattatgactactatcgttataatctaccaacaatgtgtgatatcagacaactactatttgtagttgaagttgttgataagtactttgattgttacgatggtggctgtattaatgctaaccaagtcatcgtcaacaacctagacaaatcagctggttttccatttaataaatggggtaaggctagactttattatgattcaatgagttatgaggatcaagatgcacttttcgcatatacaaaacgtaatgtcatccctactataactcaaatgaatcttaagtatgccattagtgcaaagaatagagctcgcaccgtagctggtgtctctatctgtagtactatgaccaatagacagtttcatcaaaaattattgaaatcaatagccgccactagaggagctactgtagtaattggaacaagcaaattctatggtggttggcacaacatgttaaaaactgtttatagtgatgtagaaaaccctcaccttatgggttgggattatcctaaatgtgatagagccatgcctaacatgcttagaattatggcctcacttgttcttgctcgcaaacatacaacgtgttgtagcttgtcacaccgtttctatagattagctaatgagtgtgctcaagtattgagtgaaatggtcatgtgtggcggttcactatatgttaaaccaggtggaacctcatcaggagatgccacaactgcttatgctaatagtgtttttaacatttgtcaagctgtcacggccaatgttaatgcacttttatctactgatggtaacaaaattgccgataagtatgtccgcaatttacaacacagactttatgagtgtctctatagaaatagagatgttgacacagactttgtgaatgagttttacgcatatttgcgtaaacatttctcaatgatgatactctctgacgatgctgttgtgtgtttcaatagcacttatgcatctcaaggtctagtggctagcataaagaactttaagtcagttctttattatcaaaacaatgtttttatgtctgaagcaaaatgttggactgagactgaccttactaaaggacctcatgaattttgctctcaacatacaatgctagttaaacagggtgatgattatgtgtaccttccttacccagatccatcaagaatcctaggggccggctgttttgtagatgatatcgtaaaaacagatggtacacttatgattgaacggttcgtgtctttagctatagatgcttacccacttactaaacatcctaatcaggagtatgctgatgtctttcatttgtacttacaatacataagaaagctacatgatgagttaacaggacacatgttagacatgtattctgttatgcttactaatgataacacttcaaggtattgggaacctgagttttatgaggctatgtacacaccgcatacagtcttacaggctgttggggcttgtgttctttgcaattcacagacttcattaagatgtggtgcttgcatacgtagaccattcttatgttgtaaatgctgttacgaccatgtcatatcaacatcacataaattagtcttgtctgttaatccgtatgtttgcaatgctccaggttgtgatgtcacagatgtgactcaactttacttaggaggtatgagctattattgtaaatcacataaaccacccattagttttccattgtgtgctaatggacaagtttttggtttatataaaaatacatgtgttggtagcgataatgttactgactttaatgcaattgcaacatgtgactggacaaatgctggtgattacattttagctaacacctgtactgaaagactcaagctttttgcagcagaaacgctcaaagctactgaggagacatttaaactgtcttatggtattgctactgtacgtgaagtgctgtctgacagagaattacatctttcatgggaagttggtaaacctagaccaccacttaaccgaaattatgtctttactggttatcgtgtaactaaaaacagtaaagtacaaataggagagtacacctttgaaaaaggtgactatggtgatgctgttgtttaccgaggtacaacaacttacaaattaaatgttggtgattattttgtgctgacatcacatacagtaatgccattaagtgcacctacactagtgccacaagagcactatgttagaattactggcttatacccaacactcaatatctcagatgagttttctagcaatgttgcaaattatcaaaaggttggtatgcaaaagtattctacactccagggaccacctggtactggtaagagtcattttgctattggcctagctctctactacccttctgctcgcatagtgtatacagcttgctctcatgccgctgttgatgcactatgtgagaaggcattaaaatatttgcctatagataaatgtagtagaattatacctgcacgtgctcgtgtagagtgttttgataaattcaaagtgaattcaacattagaacagtatgtcttttgtactgtaaatgcattgcctgagacgacagcagatatagttgtctttgatgaaatttcaatggccacaaattatgatttgagtgttgtcaatgccagattacgtgctaagcactatgtgtacattggcgaccctgctcaattacctgcaccacgcacattgctaactaagggcacactagaaccagaatatttcaattcagtgtgtagacttatgaaaactataggtccagacatgttcctcggaacttgtcggcgttgtcctgctgaaattgttgacactgtgagtgctttggtttatgataataagcttaaagcacataaagacaaatcagctcaatgctttaaaatgttttataagggtgttatcacgcatgatgtttcatctgcaattaacaggccacaaataggcgtggtaagagaattccttacacgtaaccctgcttggagaaaagctgtctttatttcaccttataattcacagaatgctgtagcctcaaagattttgggactaccaactcaaactgttgattcatcacagggctcagaatatgactatgtcatattcactcaaaccactgaaacagctcactcttgtaatgtaaacagatttaatgttgctattaccagagcaaaagtaggcatactttgcataatgtctgatagagacctttatgacaagttgcaatttacaagtcttgaaattccacgtaggaatgtggcaactttacaagctgaaaatgtaacaggactctttaaagattgtagtaaggtaatcactgggttacatcctacacaggcacctacacacctcagtgttgacactaaattcaaaactgaaggtttatgtgttgacatacctggcatacctaaggacatgacctatagaagactcatctctatgatgggttttaaaatgaattatcaagttaatggttaccctaacatgtttatcacccgcgaagaagctataagacatgtacgtgcatggattggcttcgatgtcgaggggtgtcatgctactagagaagctgttggtaccaatttacctttacagctaggtttttctacaggtgttaacctagttgctgtacctacaggttatgttgatacacctaataatacagatttttccagagttagtgctaaaccaccgcctggagatcaatttaaacacctcataccacttatgtacaaaggacttccttggaatgtagtgcgtataaagattgtacaaatgttaagtgacacacttaaaaatctctctgacagagtcgtatttgtcttatgggcacatggctttgagttgacatctatgaagtattttgtgaaaataggacctgagcgcacctgttgtctatgtgatagacgtgccacatgcttttccactgcttcagacacttatgcctgttggcatcattctattggatttgattacgtctataatccgtttatgattgatgttcaacaatggggttttacaggtaacctacaaagcaaccatgatctgtattgtcaagtccatggtaatgcacatgtagctagttgtgatgcaatcatgactaggtgtctagctgtccacgagtgctttgttaagcgtgttgactggactattgaatatcctataattggtgatgaactgaagattaatgcggcttgtagaaaggttcaacacatggttgttaaagctgcattattagcagacaaattcccagttcttcacgacattggtaaccctaaagctattaagtgtgtacctcaagctgatgtagaatggaagttctatgatgcacagccttgtagtgacaaagcttataaaatagaagaattattctattcttatgccacacattctgacaaattcacagatggtgtatgcctattttggaattgcaatgtcgatagatatcctgctaattccattgtttgtagatttgacactagagtgctatctaaccttaacttgcctggttgtgatggtggcagtttgtatgtaaataaacatgcattccacacaccagcttttgataaaagtgcttttgttaatttaaaacaattaccatttttctattactctgacagtccatgtgagtctcatggaaaacaagtagtgtcagatatagattatgtaccactaaagtctgctacgtgtataacacgttgcaatttaggtggtgctgtctgtagacatcatgctaatgagtacagattgtatctcgatgcttataacatgatgatctcagctggctttagcttgtgggtttacaaacaatttgatacttataacctctggaacacttttacaagacttcagagtttagaaaatgtggcttttaatgttgtaaataagggacactttgatggacaacagggtgaagtaccagtttctatcattaataacactgtttacacaaaagttgatggtgttgatgtagaattgtttgaaaataaaacaacattacctgttaatgtagcatttgagctttgggctaagcgcaacattaaaccagtaccagaggtgaaaatactcaataatttgggtgtggacattgctgctaatactgtgatctgggactacaaaagagatgctccagcacatatatctactattggtgtttgttctatgactgacatagccaagaaaccaactgaaacgatttgtgcaccactcactgtcttttttgatggtagagttgatggtcaagtagacttatttagaaatgcccgtaatggtgttcttattacagaaggtagtkttaaaggtttacaaccatctgtaggtcccaaacaagctagtcttaatggagtcacattaattggagaagccgtaaaaacacagttcaattattataagaaagttgatggtgttgtccaacaattacctgaaacttactttactcagagtagaaatttacaagaatttaaacccaggagtgaaatggaaattgatttcttagaattagctatggatgaattcattgaacggtataaattagaaggctatgccttcgaacatatcgtttatggagattttagtcatagtcagttaggtggtttacatctactgattggactagctaaacgttttaaggaatcaccttttgaattagaagattttattcctatggacagtacagttaaaaactatttcataacagatgcgcaaacaggttcatctaagtgtgtgtgttctgttattgatttattacttgatgattttgttgaaataataaaatcccaagatttatctgtagtttctaaggttgtcaaagtgactattgactatacagaaatttcatttatgctttggtgtaaagatggccatgtagaaacattttacccaaaattacaatctagtcaagcgtggcaaccgggtgttgctatgcctaatctttacaaaatgcaaagaatgctattagaaaagtgtgaccttcaaaattatggtgatagtgcaacattacctaaaggcataatgatgaatgtcgcaaaatatactcaactgtgtcaatatttaaacacattaacattagctgtaccctataatatgagagttatacattttggtgctggttctgataaaggagttgcaccaggtacagctgttttaagacagtggttgcctacgggtacgctgcttgtcgactcagatcttaatgactttgtctctgatgcagattcaactttgattggtgattgtgcaactgtacatacagctaataaatgggatctcattattagtgatatgtacgaccctaagactaaaaatgttacaaaagaaaatgactctaaagagggttttttcacttacatttgtgggtttatacaacaaaagctagctcttggaggttccgtggctataaagataacagaacattcttggaatgctgatctttataagctcatgggacacttcgcatggtggacagcctttgttactaatgtgaatgcgtcatcatctgaagcatttttaattggatgtaattatcttggcaaaccacgcgaacaaatagatggttatgtcatgcatgcaaattacatattttggaggaatacaaatccaattcagttgtcttcctattctttatttgacatgagtaaatttccccttaaattaaggggtactgctgttatgtctttaaaagaaggtcaaatcaatgatatgattttatctcttcttagtaaaggtagacttataattagagaaaacaacagagttgttatttctagtgatgttcttgttaacaactaaacgaacaatgtttgtttttcttgttttattgccactagtctctagtcagtgtgttaatcttacaaccagaactcaattaccccctgcatacactaattctttcacacgtggtgtttattaccctgacaaagttttcagatcctcagttttacattcaactcaggacttgttcttacctttcttttccaatgttacttggttccatgctatacatgtctctgggaccaatggtactaagaggtttgataaccctgtcctaccatttaatgatggtgtttattttgcttccactgagaagtctaacataataagaggctggatttttggtactactttagattcgaagacccagtccctacttattgttaataacgctactaatgttgttattaaagtctgtgaatttcaattttgtaatgatccatttttgggtgtttattaccacaaaaacaacaaaagttggatggaaagtgagttcagagtttattctagtgcgaataattgcacttttgaatatgtctctcagccttttcttatggaccttgaaggaaaacagggtaatttcaaaaatcttagggaatttgtgtttaagaatattgatggttattttaaaatatattctaagcacacgcctattaatttagtgcgtgatctccctcagggtttttcggctttagaaccattggtagatttgccaataggtattaacatcactaggtttcaaactttacttgctttacatagaagttatttgactcctggtgattcttcttcaggttggacagctggtgctgcagcttattatgtgggttatcttcaacctaggacttttctattaaaatataatgaaaatggaaccattacagatgctgtagactgtgcacttgaccctctctcagaaacaaagtgtacgttgaaatccttcactgtagaaaaaggaatctatcaaacttctaactttagagtccaaccaacagaatctattgttagatttcctaatattacaaacttgtgcccttttggtgaagtttttaacgccaccagatttgcatctgtttatgcttggaacaggaagagaatcagcaactgtgttgctgattattctgtcctatataattccgcatcattttccacttttaagtgttatggagtgtctcctactaaattaaatgatctctgctttactaatgtctatgcagattcatttgtaattagaggtgatgaagtcagacaaatcgctccagggcaaactggaaagattgctgattataattataaattaccagatgattttacaggctgcgttatagcttggaattctaacaatcttgattctaaggttggtggtaattataattacctgtatagattgtttaggaagtctaatctcaaaccttttgagagagatatttcaactgaaatctatcaggccggtagcacaccttgtaatggtgttgaaggttttaattgttactttcctttacaatcatatggtttccaacccactaatggtgttggttaccaaccatacagagtagtagtactttcttttgaacttctacatgcaccagcaactgtttgtggacctaaaaagtctactaatttggttaaaaacaaatgtgtcaatttcaacttcaatggtttaacaggcacaggtgttcttactgagtctaacaaaaagtttctgcctttccaacaatttggcagagacattgctgacactactgatgctgtccgtgatccacagacacttgagattcttgacattacaccatgttcttttggtggtgtcagtgttataacaccaggaacaaatacttctaaccaggttgctgttctttatcagggtgttaactgcacagaagtccctgttgctattcatgcagatcaacttactcctacttggcgtgtttattctacaggttctaatgtttttcaaacacgtgcaggctgtttaataggggctgaacatgtcaacaactcatatgagtgtgacatacccattggtgcaggtatatgcgctagttatcagactcagactaattctcctcggcgggcacgtagtgtagctagtcaatccatcattgcctacactatgtcacttggtgcagaaaattcagttgcttactctaataactctattgccatacccacaaattttactattagtgttaccacagaaattctaccagtgtctatgaccaagacatcagtagattgtacaatgtacatttgtggtgattcaactgaatgcagcaatcttttgttgcaatatggcagtttttgtacacaattaaaccgtgctttaactggaatagctgttgaacaagacaaaaacacccaagaagtttttgcacaagtcaaacaaatttacaaaacaccaccaattaaagattttggtggttttaatttttcacaaatattaccagatccatcaaaaccaagcaagaggtcatttattgaagatctacttttcaacaaagtgacacttgcagatgctggcttcatcaaacaatatggtgattgccttggtgatattgctgctagagacctcatttgtgcacaaaagtttaacggccttactgttttgccacctttgctcacagatgaaatgattgctcaatacacttctgcactgttagcgggtacaatcacttctggttggacctttggtgcaggtgctgcattacaaataccatttgctatgcaaatggcttataggtttaatggtattggagttacacagaatgttctctatgagaaccaaaaattgattgccaaccaatttaatagtgctattggcaaaattcaagactcactttcttccacagcaagtgcacttggaaaacttcaagatgtggtcaaccaaaatgcacaagctttaaacacgcttgttaaacaacttagctccaattttggtgcaatttcaagtgttttaaatgatatcctttcacgtcttgacaaagttgaggctgaagtgcaaattgataggttgatcacaggcagacttcaaagtttgcagacatatgtgactcaacaattaattagagctgcagaaatcagagcttctgctaatcttgctgctactaaaatgtcagagtgtgtacttggacaatcaaaaagagttgatttttgtggaaagggctatcatcttatgtccttccctcagtcagcacctcatggtgtagtcttcttgcatgtgacttatgtccctgcacaagaaaagaacttcacaactgctcctgccatttgtcatgatggaaaagcacactttcctcgtgaaggtgtctttgtttcaaatggcacacactggtttgtaacacaaaggaatttttatgaaccacaaatcattactacagacaacacatttgtgtctggtaactgtgatgttgtaataggaattgtcaacaacacagtttatgatcctttgcaacctgaattagactcattcaaggaggagttagataaatattttaagaatcatacatcaccagatgttgatttaggtgacatctctggcattaatgcttcagttgtaaacattcaaaaagaaattgaccgcctcaatgaggttgccaagaatttaaatgaatctctcatcgatctccaagaacttggaaagtatgagcagtatataaaatggccatggtacatttggctaggttttatagctggcttgattgccatagtaatggtgacaattatgctttgctgtatgaccagttgctgtagttgtctcaagggctgttgttcttgtggatcctgctgcaaatttgatgaagacgactctgagccagtgctcaaaggagtcaaattacattacacataaacgaacttatggatttgtttatgagaatcttcacaattggaactgtaactttgaagcaaggtgaaatcaaggatgctactccttcagattttgttcgcgctactgcaacgataccgatacaagcctcactccctttcggatggcttattgttggcgttgcacttcttgctgtttttcagagcgcttccaaaatcataaccctcaaaaagagatggcaactagcactctccaagggtgttcactttgtttgcaacttgctgttgttgtttgtaacagtttactcacaccttttgctcgttgctgctggccttgaagccccttttctctatctttatgctttagtctacttcttgcagagtataaactttgtaagaataataatgaggctttggctttgctggaaatgccgttccaaaaacccattactttatgatgccaactattttctttgctggcatactaattgttacgactattgtataccttacaatagtgtaacttcttcaattgtcattacttcaggtgatggcacaacaagtcctatttctgaacatgactaccagattggtggttatactgaaaaatgggaatctggagtaaaagactgtgttgtattacacagttacttcacttcagactattaccagctgtactcaactcaattgagtacagacactggtgttgaacatgttaccttcttcatctacaataaaattgttgatgagcctgaagaacatgtccaaattcacacaatcgacggttcatccggagttgttaatccagtaatggaaccaatttatgatgaaccgacgacgactactagcgtgcctttgtaagcacaagctgatgagtacgaacttatgtactcattcgtttcggaagagacaggtacgttaatagttaatagcgtacttctttttcttgctttcgtggtattcttgctagttacactagccatccttactgcgcttcgattgtgtgcgtactgctgcaatattgttaacgtgagtcttgtaaaaccttctttttacgtttactctcgtgttaaaaatctgaattcttctagagttcctgatcttccggtctaaacgaactaaatattatattagtttttctgtttggaactttaattttagccatggcagattccaacggtactattaccgttgaagagcttaaaaagctccttgaacaatggaacctagtaataggtttcctattccttacatggatttgtcttctacaatttgcctatgccaacaggaataggtttttgtatataattaagttaattttcctctggctgttatggccagtaactttagcttgttttgtgcttgctgctgtttacagaataaattggatcaccggtggaattgctatcgcaatggcttgtcttgtaggcttgatgtggctcagctacttcattgcttctttcagactgtttgcgcgtacgcgttccatgtggtcattcaatccagaaactaacattcttctcaacgtgccactccatggcactattctgaccagaccgcttctagaaagtgaactcgtaatcggagctgtgatccttcgtggacatcttcgtattgctggacaccatctaggacgctgtgacatcaaggacctgcctaaagaaatcactgttgctacatcacgaacgctttcttattacaaattgggagcttcgcagcgtgtagcaggtgactcaggttttgctgcatacagtcgctacaggattggcaactataaattaaacacagaccattccagtagcagtgacaatattgctttgcttgtacagtaagtgacaacagatgtttcatctcgttgactttcaggttactatagcagagatattactaattattatgaggacttttaaagtttccatttggaatcttgattacatcataaacctcataattaaaaatttatctaagtcactaactgagaataaatattctcaattagatgaagagcaaccaatggagattgattaaacgaacatgaaaattattcttttcttggcactgataacactcgctacttgtgagctttatcactaccaagagtgtgttagaggtacaacagtacttttaaaagaaccttgctcttctggaacatacgagggcaattcaccatttcatcctctagctgataacaaatttgcactgacttgctttagcactcaatttgcttttgcttgtcctgacggcgtaaaacacgtctatcagttacgtgccagatcagtttcacctaaactgttcatcagacaagaggaagttcaagaactttactctccaatttttcttattgttgcggcaatagtgtttataacactttgcttcacactcaaaagaaagacagaatgattgaactttcattaattgacttctatttgtgctttttagcctttctgctattccttgttttaattatgcttattatcttttggttctcacttgaactgcaagatcataatgaaacttgtcacgcctaaacgaacatgaaatttcttgttttcttaggaatcatcacaactgtagctgcatttcaccaagaatgtagtttacagtcatgtactcaacatcaaccatatgtagttgatgacccgtgtcctattcacttctattctaaatggtatattagagtaggagctagaaaatcagcacctttaattgaattgtgcgtggatgaggctggttctaaatcacccattcagtacatcgatatcggtaattatacagtttcctgtttaccttttacaattaattgccaggaacctaaattgggtagtcttgtagtgcgttgttcgttctatgaagactttttagagtatcatgacgttcgtgttgttttagatttcatctaaacgaacaaactaaaatgtctgataatggaccccaaaatcagcgaaatgcaccccgcattacgtttggtggaccctcagattcaactggcagtaaccagaatggagaacgcagtggggcgcgatcaaaacaacgtcggccccaaggtttacccaataatactgcgtcttggttcaccgctctcactcaacatggcaaggaagaccttaaattccctcgaggacaaggcgttccaattaacaccaatagcagtccagatgaccaaattggctactaccgaagagctaccagacgaattcgtggtggtgacggtaaaatgaaagatctcagtccaagatggtatttctactacctaggaactgggccagaagctggacttccctatggtgctaacaaagacggcatcatatgggttgcaactgagggagccttgaatacaccaaaagatcacattggcacccgcaatcctgctaacaatgctgcaatcgtgctacaacttcctcaaggaacaacattgccaaaaggcttctacgcagaagggagcagaggcggcagtcaagcctcttctcgttcctcatcacgtagtcgcaacagttcaagaaattcaactccaggcagcagtaggggaacttctcctgctagaatggctggcaatggcggtgatgctgctcttgctttgctgctgcttgacagattgaaccagcttgagagcaaaatgtctggtaaaggccaacaacaacaaggccaaactgtcactaagaaatctgctgctgaggcttctaagaagcctcggcaaaaacgtactgccactaaagcatacaatgtaacacaagctttcggcagacgtggtccagaacaaacccaaggaaattttggggaccaggaactaatcagacaaggaactgattacaaacattggccgcaaattgcacaatttgcccccagcgcttcagcgttcttcggaatgtcgcgcattggcatggaagtcacaccttcgggaacgtggttgacctacacaggtgccatcaaattggatgacaaagatccaaatttcaaagatcaagtcattttgctgaataagcatattgacgcatacaaaacattcccaccaacagagcctaaaaaggacaaaaagaagaaggctgatgaaactcaagccttaccgcagagacagaagaaacagcaaactgtgactcttcttcctgctgcagatttggatgatttctccaaacaattgcaacaatccatgagcagtgctgactcaactcaggcctaaactcatgcagaccacacaaggcagatgggctatataaacgttttcgcttttccgtttacgatatatagtctactcttgtgcagaatgaattctcgtaactacatagcacaagtagatgtagttaactttaatctcacatagcaatctttaatcagtgtgtaacattagggaggacttgaaannncnancncattttcnccgang

SEQ ID NO: 41 - DNA, 29703 bp, synthetic construct
  misc_feature 1..29703: note = Reconstituted virus 4
  source 1..29703: mol_type = other DNA
tataccttcccaggtaacaaaccaaccaactttcgatctcttgtagatctgttctctaaacgaactttaaaatctgtgtggctgtcactcggctgcatgcttagtgcactcacgcagtataattaataactaattactgtcgttgacaggacacgagtaactcgtctatcttctgcaggctgcttacggtttcgtccgtgttgcagccgatcatcagcacatctaggttttgtccgggtgtgaccgaaaggtaagatggagagccttgtccctggtttcaacgagaaaacacacgtccaactcagtttgcctgttttacaggttcgcgacgtgctcgtacgtggctttggagactccgtggaggaggtcttatcagaggcacgtcaacatcttaaagatggcacttgtggcttagtagaagttgaaaaaggcgttttgcctcaacttgaacagccctatgtgttcatcaaacgttcggatgctcgaactgcacctcatggtcatgttatggttgagctggtagcagaactcgaaggcattcagtacggtcgtagtggtgagacacttggtgtccttgtccctcatgtgggcgaaataccagtggcttaccgcaaggttcttcttcgtaagaacggtaataaaggagctggtggccatagttacggcgccgatctaaagtcatttgacttaggcgacgagcttggcactgatccttatgaagattttcaagaaaactggaacactaaacatagcagtggtgttacccgtgaactcatgcgtgagcttaacggaggggcatacactcgctatgtcgataacaacttctgtggccctgatggctaccctcttgagtgcattaaagaccttctagcacgtgctggtaaagcttcatgcactttgtccgaacaactggactttattgacactaagaggggtgtatactgctgccgtgaacatgagcatgaaattgcttggtacacggaacgttctgaaaagagctatgaattgcagacaccttttgaaattaaattggcaaagaaatttgacaccttcaatggggaatgtccaaattttgtatttcccttaaattccataatcaagactattcaaccaagggttgaaaagaaaaagcttgatggctttatgggtagaattcgatctgtctatccagttgcgtcaccaaatgaatgcaaccaaatgtgcctttcaactctcatgaagtgtgatcattgtggtgaaacttcatggcagacgggcgattttgttaaagccacttgcgaattttgtggcactgagaatttgactaaagaaggtgccactacttgtggttacttaccccaaaatgctgttgttaaaatttattgtccagcatgtcacaattcagaagtaggacctgagcatagtcttgccgaataccataatgaatctggcttgaaaaccattcttcgtaagggtggtcgcactattgcctttggaggctgtgtgttctcttatgttggttgccataacaagtgtgcctattgggttccacgtgctagcgctaacataggttgtaaccatacaggtgttgttggagaaggttccgaaggtcttaatgacaaccttcttgaaatactccaaaaagagaaagtcaacatcaatattgttggtgactttaaacttaatgaagagatcgccattattttggcatctttttctgcttccacaagtgcttttgtggaaactgtgaaaggtttggattataaagcattcaaacaaattgttgaatcctgtggtaattttaaagttacaaaaggaaaagctaaaaaaggtgcctggaatattggtgaacagaaatcaatactgagtcctctttatgcatttgcatcagaggctgctcgtgttgtacgatcaattttctcccgcactcttgaaactgctcaaaattctgtgcgtgttttacagaaggccgctataacaatactagatggaatttcacagtattcactgagactcattgatgctatgatgttcacatctgatttggctactaacaatctagttgtaatggcctacattacaggtggtgttgttcagttgacttcgcagtggctaactaacatctttggcactgtttatgaaaaactcaaacccgtccttgattggcttgaagagaagtttaaggaaggtgtagagtttcttagagacggttgggaaattgttaaatttatctcaacctgtgcttgtgaaattgtcggtggacaaattgtcacctgtgcaaaggaaattaaggagagtgttcagacattctttaagcttgtaaataaatttttggctttgtgtgctgactctatcattattggtggagctaaacttaaagccttgaatttaggtgaaacatttgtcacgcactcaaagggattgtacagaaagtgtgttaaatccagagaagaaactggcctactcatgcctctaaaagccccaaaagaaattatcttcttagagggagaaacacttcccacagaagtgttaacagaggaagttgtcttgaaaactggtgatttacaaccattagaacaacctactagtgaagctgttgaagctccattggttggtacaccagtttgtattaacgggcttatgttgctcgaaatcaaagacacagaaaagtactgtgcccttgcacctaatatgatggtaacaaacaataccttcacactcaaaggcggtgcaccaacaaaggttacttttggtgatgacactgtgatagaagtgcaaggttacaagagtgtgaatatcacttttgaacttgatgaaaggattgataaagtacttaatgagaagtgctctgcctatacagttgaactcggtacagaagtaaatgagttcgcctgtgttgtggcagatgctgtcataaaaactttgcaaccagtatctgaattacttacaccactgggcattgatttagatgagtggagtatggctacatactacttatttgatgagtctggtgagtttaaattggcttcacatatgtattgttctttttaccctccagatgaggatgaagaagaaggtgattgtgaagaagaagagtttgagccatcaactcaatatgagtatggtactgaagatgattaccaaggtaaacctttggaatttggtgccacttctgctgctcttcaacctgaagaagagcaagaagaagattggttagatgatgatagtcaacaaactgttggtcaacaagacggcagtgaggacaatcagacaactactattcaaacaattgttgaggttcaacctcaattagagatggaacttacaccagttgttcagactattgaagtgaatagttttagtggttatttaaaacttactgacaatgtatacattaaaaatgcagacattgtggaagaagctaaaaaggtaaaaccaacagtggttgttaatgcagccaatgtttaccttaaacatggaggaggtgttgcaggagccttaaataaggctactaacaatgccatgcaagttgaatctgatgattacatagctactaatggaccacttaaagtgggtggtagttgtgttttaagcggacacaatcttgctaaacactgtcttcatgttgtcggcccaaatgttaacaaaggtgaagacattcaacttcttaagagtgcttatgaaaattttaatcagcacgaagttctacttgcaccattattatcagctggtatttttggtgctgaccctatacattctttaagagtttgtgtagatactgttcgcacaaatgtctacttagctgtctttgataaaaatctctatgacaaacttgtttcaagctttttggaaatgaagagtgaaaagcaagttgaacaaaagatcgctgagattcctaaagaggaagttaagccatttataactgaaagtaaaccttcagttgaacagagaaaacaagatgataagaaaatcaaagcttgtgttgaagaagttacaacaactctggaagaaactaagttcctcacagaaaacttgttactttatattgacattaatggcaatcttcatccagattctgccactcttgttagtgacattgacatcactttcttaaagaaagatgctccatatatagtgggtgatgttgttcaagagggtgttttaactgctgtggttatacctactaaaaaggctggtggcactactgaaatgctagcgaaagctttgagaaaagtgccaacagacaattatataaccacttacccgggtcagggtttaaatggttacactgtagaggaggcaaagacagtgcttaaaaagtgtaaaagtgccttttacattctaccatctattatctctaatgagaagcaagaaattcttggaactgtttcttggaatttgcgagaaatgcttgcacatgcagaagaaacacgcaaattaatgcctgtctgtgtggaaactaaagccatagtttcaactatacagcgtaaatataagggtattaaaatacaagagggtgtggttgattatggtgctagattttacttttacaccagtaaaacaactgtagcgtcacttatcaacacacttaacgatctaaatgaaactcttgttacaatgccacttggctatgtaacacatggcttaaatttggaagaagctgctcggtatatgagatctctcaaagtgccagctacagtttctgtttcttcacctgatgctgttacagcgtataatggttatcttacttcttcttctaaaacacctgaagaacattttattgaaaccatctcacttgctggttcctataaagattggtcctattctggacaatctacacaactaggtatagaatttcttaagagaggtgataaaagtgtatattacactagtaatcctaccacattccacctagatggtgaagttatcacctttgacaatcttaagacacttctttctttgagagaagtgaggactattaaggtgtttacaacagtagacaacattaacctccacacgcaagttgtggacatgtcaatgacatatggacaacagtttggtccaacttatttggatggagctgatgttactaaaataaaacctcataattcacatgaaggtaaaacattttatgttttacctaatgatgacactctacgtgttgaggcttttgagtactaccacacaactgatcctagttttctgggtaggtacatgtcagcattaaatcacactaaaaagtggaaatacccacaagttaatggtttaacttctattaaatgggcagataacaactgttatcttgccactgcattgttaacactccaacaaatagagttgaagtttaatccacctgctctacaagatgcttattacagagcaagggctggtgaagctgctaacttttgtgcacttatcttagcctactgtaataagacagtaggtgagttaggtgatgttagagaaacaatgagttacttgtttcaacatgccaatttagattcttgcaaaagagtcttgaacgtggtgtgtaaaacttgtggacaacagcagacaacccttaagggtgtagaagctgttatgtacatgggcacactttcttatgaacaatttaagaaaggtgttcagataccttgtacgtgtggtaaacaagctacaaaatatctagtacaacaggagtcaccttttgttatgatgtcagcaccacctgctcagtatgaacttaagcatggtacatttacttgtgctagtgagtacactggtaattaccagtgtggtcactataaacatataacttctaaagaaactttgtattgcatagacggtgctttacttacaaagtcctcagaatacaaaggtcctattacggatgttttctacaaagaaaacagttacacaacaaccataaaaccagttacttataaattggatggtgttgtttgtacagaaattgaccctaagttggacaattattataagaaagacaattcttatttcacagagcaaccaattgatcttgtaccaaaccaaccatatccaaacgcaagcttcgataattttaagtttgtatgtgataatatcaaatttgctgatgatttaaaccagttaactggttataagaaacctgcttcaagagagcttaaagttacatttttccctgacttaaatggtgatgtggtggctattgattataaacactacacaccctcttttaagaaaggagctaaattgttacataaacctattgtttggcatgttaacaatgcaactaataaagccacgtataaaccaaatacctggtgtatacgttgtctttggagcacaaaaccagttgaaacatcaaattcgtttgatgtactgaagtcagaggacgcgcagggaatggataatcttgcctgcgaagatctaaaaccagtctctgaagaagtagtggaaaatcctaccatacagaaagacgttcttgagtgtaatgtgaaaactaccgaagttgtaggagacattatacttaaaccagcaaataatagtttaaaaattacagaagaggttggccacacagatctaatggctgcttatgtagacaattctagtcttactattaagaaacctaatgaattatctagagtattaggtttgaaaacccttgctactcatggtttagctgctgttaatagtgtcccttgggatactatagctaattatgctaagccttttcttaacaaagttgttagtacaactactaacatagttacacggtgtttaaaccgtgtttgtactaattatatgccttatttctttactttattgctacaattgtgtacttttactagaagtacaaattctagaattaaagcatctatgccgactactatagcaaagaatactgttaagagtgtcggtaaattttgtctagaggcttcatttaattatttgaagtcacctaatttttctaaactgataaatattataatttggtttttactattaagtgtttgcctaggttctttaatctactcaaccgctgctttaggtgttttaatgtctaatttaggcatgccttcttactgtactggttacagagaaggctatttgaactctactaatgtcactattgcaacctactgtactggttctataccttgtagtgtttgtcttagtggtttagattctttagacacctatccttctttagaaactatacaaattaccatttcatcttttaaatgggatttaactgcttttggcttagttgcagagtggtttttggcatatattcttttcactaggtttttctatgtacttggattggctgcaatcatgcaattgtttttcagctattttgcagtacattttattagtaattcttggcttatgtggttaataattaatcttgtacaaatggccccgatttcagctatggttagaatgtacatcttctttgcatcattttattatgtatggaaaagttatgtgcatgttgtagacggttgtaattcatcaacttgtatgatgtgttacaaacgtaatagagcaacaagagtcgaatgtacaactattgttaatggtgttagaaggtccttttatgtctatgctaatggaggtaaaggcttttgcaaactacacaattggaattgtgttaattgtgatacattctgtgctggtagtacatttattagtgatgaagttgcgagagacttgtcactacagtttaaaagaccaataaatcctactgaccagtcttcttacatcgttgatagtgttacagtgaagaatggttccatccatctttactttgataaagctggtcaaaagacttatgaaagacattctctctctcattttgttaacttagacaacctgagagctaataacactaaaggttcattgcctattaatgttatagtttttgatggtaaatcaaaatgtgaagaatcatctgcaaaatcagcgtctgtttactacagtcagcttatgtgtcaacctatactgttactagatcaggcattagtgtctgatgttggtgatagtgcggaagttgcagttaaaatgtttgatgcttacgttaatacgttttcatcaacttttaacgtaccaatggaaaaactcaaaacactagttgcaactgcagaagctgaacttgcaaagaatgtgtccttagacaatgtcttatctacttttatttcagcagctcggcaagggtttgttgattcagatgtagaaactaaagatgttgttgaatgtcttaaattgtcacatcaatctgacatagaagttactggcgatagttgtaataactatatgctcacctataacaaagttgaaaacatgacaccccgtgaccttggtgcttgtattgactgtagtgcgcgtcatattaatgcgcaggtagcaaaaagtcacaacattgctttgatatggaacgttaaagatttcatgtcattgtctgaacaactacgaaaacaaatacgtagtgctgctaaaaagaataacttaccttttaagttgacatgtgcaactactagacaagttgttaatgttgtaacaacaaagatagcacttaagggtggtaaaattgttaataattggttgaagcagttaattaaagttacacttgtgttcctttttgttgctgctattttctatttaataacacctgttcatgtcatgtctaaacatactgacttttcaagtgaaatcataggatacaaggctattgatggtggtgtcactcgtgacatagcatctacagatacttgttttgctaacaaacatgctgattttgacacatggtttagccagcgtggtggtagttatactaatgacaaagcttgcccattgattgctgcagtcataacaagagaagtgggttttgtcgtgcctggtttgcctggcacgatattacgcacaactaatggtgactttttgcatttcttacctagagtttttagtgcagttggtaacatctgttacacaccatcaaaacttatagagtacactgactttgcaacatcagcttgtgttttggctgctgaatgtacaatttttaaagatgcttctggtaagccagtaccatattgttatgataccaatgtactagaaggttctgttgcttatgaaagtttacgccctgacacacgttatgtgctcatggatggctctattattcaatttcctaacacctaccttgaaggttctgttagagtggtaacaacttttgattctgagtactgtaggcacggcacttgtgaaagatcagaagctggtgtttgtgtatctactagtggtagatgggtacttaacaatgattattacagatctttaccaggagttttctgtggtgtagatgctgtaaatttacttactaatatgtttacaccactaattcaacctattggtgctttggacatatcagcatctatagtagctggtggtattgtagctatcgtagtaacatgccttgcctactattttatgaggtttagaagagcttttggtgaatacagtcatgtagttgcctttaatactttactattccttatgtcattcactgtactctgtttaacaccagtttactcattcttacctggtgtttattctgttatttacttgtacttgacattttatcttactaatgatgtttcttttttagcacatattcagtggatggttatgttcacacctttagtacctttctggataacaattgcttatatcatttgtatttccacaaagcatttctattggttctttagtaattacctaaagagacgtgtagtctttaatggtgtttcctttagtacttttgaagaagctgcgctgtgcacctttttgttaaataaagaaatgtatctaaagttgcgtagtgatgtgctattacctcttacgcaatataatagatacttagctctttataataagtacaagtattttagtggagcaatggatacaactagctacagagaagctgcttgttgtcatctcgcaaaggctctcaatgacttcagtaactcaggttctgatgttctttaccaaccaccacaaacctctatcacctcagctgttttgcagagtggttttagaaaaatggcattcccatctggtaaagttgagggttgtatggtacaagtaacttgtggtacaactacacttaacggtctttggcttgatgacgtagtttactgtccaagacatgtgatctgcacctctgaagacatgcttaaccctaattatgaagatttactcattcgtaagtctaatcataatttcttggtacaggctggtaatgttcaactcagggttattggacattctatgcaaaattgtgtacttaagcttaaggttgatacagccaatcctaagacacctaagtataagtttgttcgcattcaaccaggacagactttttcagtgttagcttgttacaatggttcaccatctggtgtttaccaatgtgctatgaggcccaatttcactattaagggttcattccttaatggttcatgtggtagtgttggttttaacatagattatgactgtgtctctttttgttacatgcaccatatggaattaccaactggagttcatgctggcacagacttagaaggtaacttttatggaccttttgttgacaggcaaacagcacaagcagctggtacggacacaactattacagttaatgttttagcttggttgtacgctgctgttataaatggagacaggtggtttctcaatcgatttaccacaactcttaatgactttaaccttgtggctatgaagtacaattatgaacctctaacacaagaccatgttgacatactaggacctctttctgctcaaactggaattgccgttttagatatgtgtgcttcattaaaagaattactgcaaaatggtatgaatggacgtaccatattgggtagtgctttattagaagatgaatttacaccttttgatgttgttagacaatgctcaggtgttactttccaaagtgcagtgaaaagaacaatcaagggtacacaccactggttgttactcacaattttgacttcacttttagttttagtccagagtactcaatggtctttgttcttttttttgtatgaaaatgcctttttaccttttgctatgggtattattgctatgtctgcttttgcaatgatgtttgtcaaacataagcatgcatttctctgtttgtttttgttaccttctcttgccactgtagcttattttaatatggtctatatgcctgctagttgggtgatgcgtattatgacatggttggatatggttgatactagtttgtctggttttaagctaaaagactgtgttatgtatgcatcagctgtagtgttactaatccttatgacagcaagaactgtgtatgatgatggtgctaggagagtgtggacacttatgaatgtcttgacactcgtttataaagtttattatggtaatgctttagatcaagccatttccatgtgggctcttataatctctgttacttctaactactcaggtgtagttacaactgtcatgtttttggccagaggtattgtttttatgtgtgttgagtattgccctattttcttcataactggtaatacacttcagtgtataatgctagtttattgtttcttaggctatttttgtacttgttactttggcctcttttgtttactcaaccgctactttagactgactcttggtgtttatgattacttagtttctacacaggagtttagatatatgaattcacagggactactcccacccaagaatagcatagatgccttcaaactcaacattaaattgttgggtgttggtggcaaaccttgtatcaaagtagccactgtacagtctaaaatgtcagatgtaaagtgcacatcagtagtcttactctcagttttgcaacaactcagagtagaatcatcatctaaattgtgggctcaatgtgtccagttacacaatgacattctcttagctaaagatactactgaagcctttgaaaaaatggtttcactactttctgttttgctttccatgcagggtgctgtagacataaacaagctttgtgaagaaatgctggacaacagggcaaccttacaagctatagcctcagagtttagttcccttccatcatatgcagcttttgctactgctcaagaagcttatgagcaggctgttgctaatggtgattctgaagttgttcttaaaaagttgaagaagtctttgaatgtggctaaatctgaatttgaccgtgatgcagccatgcaacgtaagttggaaaagatggctgatcaagctatgacccaaatgtataaacaggctagatctgaggacaagagggcaaaagttactagtgctatgcagacaatgcttttcactatgcttagaaagttggataatgatgcactcaacaacattatcaacaatgcaagagatggttgtgttcccttgaacataatacctcttacaacagcagccaaactaatggttgtcataccagactataacacatataaaaatacgtgtgatggtacaacatttacttatgcatcagcattgtgggaaatccaacaggttgtagatgcagatagtaaaattgttcaacttagtgaaattagtatggacaattcacctaatttagcatggcctcttattgtaacagctttaagggccaattctgctgtcaaattacagaataatgagcttagtcctgttgcactacgacagatgtcttgtgctgccggtactacacaaactgcttgcactgatgacaatgcgttagcttactacaacacaacaaagggaggtaggtttgtacttgcactgttatccgatttacaggatttgaaatgggctagattccctaagagtgatggaactggtactatctatacagaactggaaccaccttgtaggtttgttacagacacacctaaaggtcctaaagtgaagtatttatactttattaaaggattaaacaacctaaatagaggtatggtacttggtagtttagctgccacagtacgtctacaagctggtaatgcaacagaagtgcctgccaattcaactgtattatctttctgtgcttttgctgtagatgctgctaaagcttacaaagattatctagctagtgggggacaaccaatcactaattgtgttaagatgttgtgtacacacactggtactggtcaggcaataacagttacaccggaagccaatatggatcaagaatcctttggtggtgcatcgtgttgtctgtactgccgttgccacatagatcatccaaatcctaaaggattttgtgacttaaaaggtaagtatgtacaaatacctacaacttgtgctaatgaccctgtgggttttacacttaaaaacacagtctgtaccgtctgcggtatgtggaaaggttatggctgtagttgtgatcaactccgcgaacccatgcttcagtcagctgatgcacaatcgtttttaaacgggtttgcggtgtaagtgcagcccgtcttacaccgtgcggcacaggcactagtactgatgtcgtatacagggcttttgacatctacaatgataaagtagctggttttgctaaattcctaaaaactaattgttgtcgcttccaagaaaaggacgaagatgacaatttaattgattcttactttgtagttaagagacacactttctctaactaccaacatgaagaaacaatttataatttacttaaggattgtccagctgttgctaaacatgacttctttaagtttagaatagacggtgacatggtaccacatatatcacgtcaacgtcttactaaatacacaatggcagacctcgtctatgctttaaggcattttgatgaaggtaattgtgacacattaaaagaaatacttgtcacatacaattgttgtgatgatgattatttcaataaaaaggactggtatgattttgtagaaaacccagatatattacgcgtatacgccaacttaggtgaacgtgtacgccaagctttgttaaaaacagtacaattctgtgatgccatgcgaaatgctggtattgttggtgtactgacattagataatcaagatctcaatggtaactggtatgatttcggtgatttcatacaaaccacgccaggtagtggagttcctgttgtagattcttattattcattgttaatgcctatattaaccttgaccagggctttaactgcagagtcacatgttgacactgacttaacaaagccttacattaagtgggatttgttaaaatatgacttcacggaagagaggttaaaactctttgaccgttattttaaatattgggatcagacataccacccaaattgtgttaactgtttggatgacagatgcattctgcattgtgcaaactttaatgttttattctctacagtgttcccacttacaagttttggaccactagtgagaaaaatatttgttgatggtgttccatttgtagtttcaactggataccacttcagagagctaggtgttgtacataatcaggatgtaaatttacatagctctagacttagttttaaggaattacttgtgtatgctgctgaccctgctatgcacgctgcttctggtaatctattactagataaacgcactacgtgcttttcagtagctgcacttactaacaatgttgcttttcaaactgtcaaacccggtaattttaacaaagacttctatgactttgctgtgtctaagggtttctttaaggaaggaagttctgttgaattaaaacacttcttctttgctcaggatggtaatgctgctatcagcgattatgactactatcgttataatctaccaacaatgtgtgatatcagacaactactatttgtagttgaagttgttgataagtactttgattgttacgatggtggctgtattaatgctaaccaagtcatcgtcaacaacctagacaaatcagctggttttccatttaataaatggggtaaggctagactttattatgattcaatgagttatgaggatcaagatgcacttttcgcatatacaaaacgtaatgtcatccctactataactcaaatgaatcttaagtatgccattagtgcaaagaatagagctcgcaccgtagctggtgtctctatctgtagtactatgaccaatagacagtttcatcaaaaattattgaaatcaatagccgccactagaggagctactgtagtaattggaacaagcaaattctatggtggttggcacaacatgttaaaaactgtttatagtgatgtagaaaaccctcaccttatgggttgggattatcctaaatgtgatagagccatgcctaacatgcttagaattatggcctcacttgttcttgctcgcaaacatacaacgtgttgtagcttgtcacaccgtttctatagattagctaatgagtgtgctcaagtattgagtgaaatggtcatgtgtggcggttcactatatgttaaaccaggtggaacctcatcaggagatgccacaactgcttatgctaatagtgtttttaacatttgtcaagctgtcacggccaatgttaatgcacttttatctactgatggtaacaaaattgccgataagtatgtccgcaatttacaacacagactttatgagtgtctctatagaaatagagatgttgacacagactttgtgaatgagttttacgcatatttgcgtaaacatttctcaatgatgatactctctgacgatgctgttgtgtgtttcaatagcacttatgcatctcaaggtctagtggctagcataaagaactttaagtcagttctttattatcaaaacaatgtttttatgtctgaagcaaaatgttggactgagactgaccttactaaaggacctcatgaattttgctctcaacatacaatgctagttaaacagggtgatgattatgtgtaccttccttacccagatccatcaagaatcctaggggccggctgttttgtagatgatatcgtaaaaacagatggtacacttatgattgaacggttcgtgtctttagctatagatgcttacccacttactaaacatcctaatcaggagtatgctgatgtctttcatttgtacttacaatacataagaaagctacatgatgagttaacaggacacatgttagacatgtattctgttatgcttactaatgataacacttcaaggtattgggaacctgagttttatgaggctatgtacacaccgcatacagtcttacaggctgttggggcttgtgttctttgcaattcacagacttcattaagatgtggtgcttgcatacgtagaccattcttatgttgtaaatgctgttacgaccatgtcatatcaacatcacataaattagtcttgtctgttaatccgtatgtttgcaatgctccaggttgtgatgtcacagatgtgactcaactttacttaggaggtatgagctattattgtaaatcacataaaccacccattagttttccattgtgtgctaatggacaagtttttggtttatataaaaatacatgtgttggtagcgataatgttactgactttaatgcaattgcaacatgtgactggacaaatgctggtgattacattttagctaacacctgtactgaaagactcaagctttttgcagcagaaacgctcaaagctactgaggagacatttaaactgtcttatggtattgctactgtacgtgaagtgctgtctgacagagaattacatctttcatgggaagttggtaaacctagaccaccacttaaccgaaattatgtctttactggttatcgtgtaactaaaaacagtaaagtacaaataggagagtacacctttgaaaaaggtgactatggtgatgctgttgtttaccgaggtacaacaacttacaaattaaatgttggtgattattttgtgctgacatcacatacagtaatgccattaagtgcacctacactagtgccacaagagcactatgttagaattactggcttatacccaacactcaatatctcagatgagttttctagcaatgttgcaaattatcaaaaggttggtatgcaaaagtattctacactccagggaccacctggtactggtaagagtcattttgctattggcctagctctctactacccttctgctcgcatagtgtatacagcttgctctcatgccgctgttgatgcactatgtgagaaggcattaaaatatttgcctatagataaatgtagtagaattatacctgcacgtgctcgtgtagagtgttttgataaattcaaagtgaattcaacattagaacagtatgtcttttgtactgtaaatgcattgcctgagacgacagcagatatagttgtctttgatgaaatttcaatggccacaaattatgatttgagtgttgtcaatgccagattacgtgctaagcactatgtgtacattggcgaccctgctcaattacctgcaccacgcacattgctaactaagggcacactagaaccagaatatttcaattcagtgtgtagacttatgaaaactataggtccagacatgttcctcggaacttgtcggcgttgtcctgctgaaattgttgacactgtgagtgctttggtttatgataataagcttaaagcacataaagacaaatcagctcaatgctttaaaatgttttataagggtgttatcacgcatgatgtttcatctgcaattaacaggccacaaataggcgtggtaagagaattccttacacgtaaccctgcttggagaaaagctgtctttatttcaccttataattcacagaatgctgtagcctcaaagattttgggactaccaactcaaactgttgattcatcacagggctcagaatatgactatgtcatattcactcaaaccactgaaacagctcactcttgtaatgtaaacagatttaatgttgctattaccagagcaaaagtaggcatactttgcataatgtctgatagagacctttatgacaagttgcaatttacaagtcttgaaattccacgtaggaatgtggcaactttacaagctgaaaatgtaacaggactctttaaagattgtagtaaggtaatcactgggttacatcctacacaggcacctacacacctcagtgttgacactaaattcaaaactgaaggtttatgtgttgacatacctggcatacctaaggacatgacctatagaagactcatctctatgatgggttttaaaatgaattatcaagttaatggttaccctaacatgtttatcacccgcgaagaagctataagacatgtacgtgcatggattggcttcgatgtcgaggggtgtcatgctactagagaagctgttggtaccaatttacctttacagctaggtttttctacaggtgttaacctagttgctgtacctacaggttatgttgatacacctaataatacagatttttccagagttagtgctaaaccaccgcctggagatcaatttaaacacctcataccacttatgtacaaaggacttccttggaatgtagtgcgtataaagattgtacaaatgttaagtgacacacttaaaaatctctctgacagagtcgtatttgtcttatgggcacatggctttgagttgacatctatgaagtattttgtgaaaataggacctgagcgcacctgttgtctatgtgatagacgtgccacatgcttttccactgcttcagacacttatgcctgttggcatcattctattggatttgattacgtctataatccgtttatgattgatgttcaacaatggggttttacaggtaacctacaaagcaaccatgatctgtattgtcaagtccatggtaatgcacatgtagctagttgtgatgcaatcatgactaggtgtctagctgtccacgagtgctttgttaagcgtgttgactggactattgaatatcctataattggtgatgaactgaagattaatgcggcttgtagaaaggttcaacacatggttgttaaagctgcattattagcagacaaattcccagttcttcacgacattggtaaccctaaagctattaagtgtgtacctcaagctgatgtagaatggaagttctatgatgcacagccttgtagtgacaaagcttataaaatagaagaattattctattcttatgccacacattctgacaaattcacagatggtgtatgcctattttggaattgcaatgtcgatagatatcctgctaattccattgtttgtagatttgacactagagtgctatctaaccttaacttgcctggttgtgatggtggcagtttgtatgtaaataaacatgcattccacacaccagcttttgataaaagtgcttttgttaatttaaaacaattaccatttttctattactctgacagtccatgtgagtctcatggaaaacaagtagtgtcagatatagattatgtaccactaaagtctgctacgtgtataacacgttgcaatttaggtggtgctgtctgtagacatcatgctaatgagtacagattgtatctcgatgcttataacatgatgatctcagctggctttagcttgtgggtttacaaacaatttgatacttataacctctggaacacttttacaagacttcagagtttagaaaatgtggcttttaatgttgtaaataagggacactttgatggacaacagggtgaagtaccagtttctatcattaataacactgtttacacaaaagttgatggtgttgatgtagaattgtttgaaaataaaacaacattacctgttaatgtagcatttgagctttgggctaagcgcaacattaaaccagtaccagaggtgaaaatactcaataatttgggtgtggacattgctgctaatactgtgatctgggactacaaaagagatgctccagcacatatatctactattggtgtttgttctatgactgacatagccaagaaaccaactgaaacgatttgtgcaccactcactgtcttttttgatggtagagttgatggtcaagtagacttatttagaaatgcccgtaatggtgttcttattacagaaggtagtgttaaaggtttacaaccatctgtaggtcccaaacaagctagtcttaatggagtcacattaattggagaagccgtaaaaacacagttcaattattataagaaagttgatggtgttgtccaacaattacctgaaacttactttactcagagtagaaatttacaagaatttaaacccaggagtcaaatggaaattgatttcttagaattagctatggatgaattcattgaacggtataaattagaaggctatgccttcgaacatatcgtttatggagattttagtcatagtcagttaggtggtttacatctactgattggactagctaaacgttttaaggaatcaccttttgaattagaagattttattcctatggacagtacagttaaaaactatttcataacagatgcgcaaacaggttcatctaagtgtgtgtgttctgttattgatttattacttgatgattttgttgaaataataaaatcccaagatttatctgtagtttctaaggttgtcaaagtgactattgactatacagaaatttcatttatgctttggtgtaaagatggccatgtagaaacattttacccaaaattacaatctagtcaagcgtggcaaccgggtgttgctatgcctaatctttacaaaatgcaaagaatgctattagaaaagtgtgaccttcaaaattatggtgatagtgcaacattacctaaaggcataatgatgaatgtcgcaaaatatactcaactgtgtcaatatttaaacacattaacattagctgtaccctataatatgagagttatacattttggtgctggttctgataaaggagttgcaccaggtacagctgttttaagacagtggttgcctacgggtacgctgcttgtcgactcagatcttaatgactttgtctctgatgcagattcaactttgattggtgattgkgcaactgtacatacagctaataaatgggatctcattattagtgatatgtacgaccctaagactaaaaatgttacaaaagaaaatgactctaaagagggttttttcacttacatttgtgggtttatacaacaaaagctagctcttggaggttccgtggctataaagataacagaacattcttggaatgctgatctttataagctcatgggacacttcgcatggtggacagcctttgttactaatgtgaatgcgtcatcatctgaagcatttttaattggatgtaattatcttggcaaaccacgcgaacaaatagatggttatgtcatgcatgcaaattacatattttggaggaatacaaatccaattcagttgtcttcctattctttatttgacatgagtaaatttccccttaaattaaggggtactgctgttatgtctttaaaagaaggtcaaatcaatgatatgattttatctcttcttagtaaaggtagacttataattagagaaaacaacagagttgttatttctagtgatgttcttgttaacaactaaacgaacaatgtttgtttttcttgttttattgccactagtctctagtcagtgtgttaatcttacaamcagaactcaattacccyctgcatacactaattctttcacacgtggtgtttattaccctgacaaagttttcagatcctcagttttacattcaactcaggacttgttcttacctttcttttccaatgttacttggttccatgctatacatgtctctgggaccaatggtactaagaggtttgataaccctgtcctaccatttaatgatggtgtttattttgcttccactgagaagtctaacataataagaggctggatttttggtactactttagattcgaagacccagtccctacttattgttaataacgctactaatgttgttattaaagtctgtgaatttcaattttgtaatgatccatttttgggtgtttattaccacaaaaacaacaaaagttggatggaaagtgagttcagagtttattctagtgcgaataattgcacttttgaatatgtctctcagccttttcttatggaccttgaaggaaaacagggtaatttcaaaaatcttagggaatttgtgtttaagaatattgatggttattttaaaatatattctaagcacacgcctattaatttagtgcgtgatctccctcagggtttttcggctttagaaccattggtagatttgccaataggtattaacatcactaggtttcaaactttacttgctttacatagaagttatttgactcctggtgattcttcttcaggttggacagctggtgctgcagcttattatgtgggttatcttcaacctaggacttttctattaaaatataatgaaaatggaaccattacagatgctgtagactgtgcacttgaccctctctcagaaacaaagtgtacgttgaaatccttcactgtagaaaaaggaatctatcaaacttctaactttagagtccaaccaacagaatctattgttagatttcctaatattacaaacttgtgcccttttggtgaagtttttaacgccaccagatttgcatctgtttatgcttggaacaggaagagaatcagcaactgtgttgctgattattctgtcctatataattccgcatcattttccacttttaagtgttatggagtgtctcctactaaattaaatgatctctgctttactaatgtctatgcagattcatttgtaattagaggtgatgaagtcagacaaatcgctccagggcaaactggaaagattgctgattataattataaattaccagatgattttacaggctgcgttatagcttggaattctaacaatcttgattctaaggttggtggtaattataattacctgtatagattgtttaggaagtctaatctcaaaccttttgagagagatatttcaactgaaatctatcaggccggtagcacaccttgtaatggtgttgaaggttttaattgttactttcctttacaatcatatggtttccaacccactaatggtgttggttaccaaccatacagagtagtagtactttcttttgaacttctacatgcaccagcaactgtttgtggacctaaaaagtctactaatttggttaaaaacaaatgtgtcaatttcaacttcaatggtttaacaggcacaggtgttcttactgagtctaacaaaaagtttctgcctttccaacaatttggcagagacattgctgacactactgatgctgtccgtgatccacagacacttgagattcttgacattacaccatgttcttttggtggtgtcagtgttataacaccaggaacaaatacttctaaccaggttgctgttctttatcagggtgttaactgcacagaagtccctgttgctattcatgcagatcaacttactcctacttggcgtgtttattctacaggttctaatgtttttcaaacacgtgcaggctgtttaataggggctgaacatgtcaacaactcatatgagtgtgacatacccattggtgcaggtatatgcgctagttatcagactcagactaattctcctcggcgggcacgtagtgtagctagtcaatccatcattgcctacactatgtcacttggtgcagaaaattcagttgcttactctaataactctattgccatacccacaaattttactattagtgttaccacagaaattctaccagtgtctatgaccaagacatcagtagattgtacaatgtacatttgtggtgattcaactgaatgcagcaatcttttgttgcaatatggcagtttttgtacacaattaaaccgtgctttaactggaatagctgttgaacaagacaaaaacacccaagaagtttttgcacaagtcaaacaaatttacaaaacaccaccaattaaagattttggtggttttaatttttcacaaatattaccagatccatcaaaaccaagcaagaggtcatttattgaagatctacttttcaacaaagtgacacttgcagatgctggcttcatcaaacaatatggtgattgccttggtgatattgctgctagagacctcatttgtgcacaaaagtttaacggccttactgttttgccacctttgctcacagatgaaatgattgctcaatacacttctgcactgttagcgggtacaatcacttctggttggacctttggtgcaggtgctgcattacaaataccatttgctatgcaaatggcttataggtttaatggtattggagttacacagaatgttctctatgagaaccaaaaattgattgccaaccaatttaatagtgctattggcaaaattcaagactcactttcttccacagcaagtgcacttggaaaacttcaagatgtggtcaaccaaaatgcacaagctttaaacacgcttgttaaacaacttagctccaattttggtgcaatttcaagtgttttaaatgatatcctttcacgtcttgacaaagttgaggctgaagtgcaaattgataggttgatcacaggcagacttcaaagtttgcagacatatgtgactcaacaattaattagagctgcagaaatcagagcttctgctaatcttgctgctactaaaatgtcagagtgtgtacttggacaatcaaaaagagttgatttttgtggaaagggctatcatcttatgtccttccctcagtcagcacctcatggtgtagtcttcttgcatgtgacttatgtccctgcacaagaaaagaacttcacaactgctcctgccatttgtcatgatggaaaagcacactttcctcgtgaaggtgtctttgtttcaaatggcacacactggtttgtaacacaaaggaatttttatgaaccacaaatcattactacagacaacacatttgtgtctggtaactgtgatgttgtaataggaattgtcaacaacacagtttatgatcctttgcaacctgaattagactcattcaaggaggagttagataaatattttaagaatcatacatcaccagatgttgatttaggtgacatctctggcattaatgcttcagttgtaaacattcaaaaagaaattgaccgcctcaatgaggttgccaagaatttaaatgaatctctcatcgatctccaagaacttggaaagtatgagcagtatataaaatggccatggtacatttggctaggttttatagctggcttgattgccatagtaatggtgacaattatgctttgctgtatgaccagttgctgtagttgtctcaagggctgttgttcttgtggatcctgctgcaaatttgatgaagacgactctgagccagtgctcaaaggagtcaaattacattacacataaacgaacttatggatttgtttatgagaatcttcacaattggaactgtaactttgaagcaaggtgaaatcaaggatgctactccttcagattttgttcgcgctactgcaacgataccgatacaagcctcactccctttcggatggcttattgttggcgttgcacttcttgctgtttttcagagcgcttccaaaatcataaccctcaaaaagagatggcaactagcactctccaagggtgttcactttgtttgcaacttgctgttgttgtttgtaacagtttactcacaccttttgctcgttgctgctggccttgaagccccttttctctatctttatgctttagtctacttcttgcagagtataaactttgtaagaataataatgmggctttggctttgctggaaatgccgttccaaaaacccattactttatgatgccaactattttctttgctggcatactaattgttacgactattgtataccttacaatagtgtaacttcttcaattgtcattacttcaggtgatggcacaacaagtcctatttctgaacatgactaccagattggtggttatactgaaaaatgggaatctggagtaaaagactgtgttgtattacacagttacttcacttcagactattaccagctgtactcaactcaattgagtacagacactggtgttgaacatgttaccttcttcatctacaataaaattgttgatgagcctgaagaacatgtccaaattcacacaatcgacggttcatccggagttgttaatccagtaatggaaccaatttatgatgaaccgacgacgactactagcgtgcctttgtaagcacaagctgatgagtacgaacttatgtactcattcgtttcggaagagacaggtacgttaatagttaatagcgtacttctttttcttgctttcgtggtattcttgctagttacactagccatccttactgcgcttcgattgtgtgcgtactgctgcaatattgttaacgtgagtcttgtaaaaccttctttttacgtttactctcgtgttaaaaatctgaattcttctagagttcctgatcttccggtctaaacgaactaaatattatattagtttttctgtttggaactttaattttagccatggcagattccaacggtactattaccgttgaagagcttaaaaagctccttgaacaatggaacctagtaataggtttcctattccttacatggatttgtcttctacaatttgcctatgccaacaggaataggtttttgtatataattaagttaattttcctctggctgttatggccagtaactttagcttgttttgtgcttgctgctgtttacagaataaattggatcaccggtggaattgctatcgcaatggcttgtcttgtaggcttgatgtggctcagctacttcattgcttctttcagactgtttgcgcgtacgcgttccatgtggtcattcaatccagaaactaacattcttctcaacgtgccactccatggcactattctgaccagaccgcttctagaaagtgaactcgtaatcggagctgtgatccttcgtggacatcttcgtattgctggacaccatctaggacgctgtgacatcaaggacctgcctaaagaaatcactgttgctacatcacgaacgctttcttattacaaattgggagcttcgcagcgtgtagcaggtgactcaggttttgctgcatacagtcgctacaggattggcaactataaattaaacacagaccattccagtagcagtgacaatattgctttgcttgtacagtaagtgacaacagatgtttcatctcgttgactttcaggttactatagcagagatattactaattattatgaggacttttaaagtttccatttggaatcttgattacatcataaacctcataattaaaaatttatctaagtcactaactgagaataaatattctcaattagatgaagagcaaccaatggagattgattaaacgaacatgaaaattattcttttcttggcactgataacactcgctacttgtgagctttatcactaccaagagtgtgttagaggtacaacagtacttttaaaagaaccttgctcttctggaacatacgagggcaattcaccatttcatcctctagctgataacaaatttgcactgacttgctttagcactcaatttgcttttgcttgtcctgacggcgtaaaacacgtctatcagttacgtgccagatcagtttcacctaaactgttcatcagacaagaggaagttcaagaactttactctccaatttttcttattgttgcggcaatagtgtttataacactttgcttcacactcaaaagaaagacagaatgattgaactttcattaattgacttctatttgtgctttttagcctttctgctattccttgttttaattatgcttattatcttttggttctcacttgaactgcaagatcataatgaaacttgtcacgcctaaacgaacatgaaatttcttgttttcttaggaatcatcacaactgtagctgcatttcaccaagaatgtagtttacagtcatgtactcaacatcaaccatatgtagttgatgacccgtgtcctattcacttctattctaaatggtatattagagtaggagctagaaaatcagcacctttaattgaattgtgcgtggatgaggctggttctaaatcacccattcagtacatcgatatcggtaattatacagtttcctgtttaccttttacaattaattgccaggaacctaaattgggtagtcttgtagtgcgttgttcgttctatgaagactttttagagtatcatgacgttcgtgttgttttagatttcatctaaacgaacaaactaaaatgtctgataatggaccccaaaatcagcgaaatgcaccccgcattacgtttggtggaccctcagattcaactggcagtaaccagaatggagaacgcagtggggcgcgatcaaaacaacgtcggccccaaggtttacccaataatactgcgtcttggttcaccgctctcactcaacatggcaaggaagaccttaaattccctcgaggacaaggcgttccaattaacaccaatagcagtccagatgaccaaattggctactaccgaagagctaccagacgaattcgtggtggtgacggtaaaatgaaagatctcagtccaagatggtatttctactacctaggaactgggccagaagctggacttccctatggtgctaacaaagacggcatcatatgggttgcaactgagggagccttgaatacaccaaaagatcacattggcacccgcaatcctgctaacaatgctgcaatcgtgctacaacttcctcaaggaacaacattgccaaaaggcttctacgcagaagggagcagaggcggcagtcaagcctcttctcgttcctcatcacgtagtcgcaacagttcaagaaattcaactccaggcagcagtaggggaacttctcctgctagaatggctggcaatggcggtgatgctgctcttgctttgctgctgcttgacagattgaaccagcttgagagcaaaatgtctggtaaaggccaacaacaacaaggccaaactgtcactaagaaatctgctgctgaggcttctaagaagcctcggcaaaaacgtactgccactaaagcatacaatgtaacacaagctttcggcagacgtggtccagaacaaacccaaggaaattttggggaccaggaactaatcagacaaggaactgattacaaacattggccgcaaattgcacaatttgcccccagcgcttcagcgttcttcggaatgtcgcgcattggcatggaagtcacaccttcgggaacgtggttgacctacacaggtgccatcaaattggatgacaaagatccaaatttcaaagatcaagtcattttgctgaataagcatattgacgcatacaaaacattcccaccaacagagcctaaaaaggacaaaaagaagaaggctgatgaaactcaagccttaccgcagagacagaagaaacagcaaactgtgactcttcttcctgctgcagatttggatgatttctccaaacaattgcaacaatccatgagcagtgctgactcaactcaggcctaaactcatgcagaccacacaaggcagatgggctatataaacgttttcgcttttccgtttacgatatatagtctactcttgtgcagaatgaattctcgtaactacatagcacaagtagatgtagttaactttaatctcacatagcaatctttaatcagtgtgtaacattagggaggacttgaa

SEQ ID NO: 42 - DNA, 29703 bp, synthetic construct
  misc_feature 1..29703: note = Reconstituted virus 5
  source 1..29703: mol_type = other DNA
tataccttcccaggtaacaaaccaaccaactttcgatctcttgtagatctgttctctaaacgaactttaaaatctgtgtggctgtcactcggctgcatgcttagtgcactcacgcagtataattaataactaattactgtcgttgacaggacacgagtaactcgtctatcttctgcaggctgcttacggtttcgtccgtgttgcagccgatcatcagcacatctaggttttgtccgggtgtgaccgaaaggtaagatggagagccttgtccctggtttcaacgagaaaacacacgtccaactcagtttgcctgttttacaggttcgcgacgtgctcgtacgtggctttggagactccgtggaggaggtcttatcagaggcacgtcaacatcttaaagatggcacttgtggcttagtagaagttgaaaaaggcgttttgcctcaacttgaacagccctatgtgttcatcaaacgttcggatgctcgaactgcacctcatggtcatgttatggttgagctggtagcagaactcgaaggcattcagtacggtcgtagtggtgagacacttggtgtccttgtccctcatgtgggcgaaataccagtggcttaccgcaaggttcttcttcgtaagaacggtaataaaggagctggtggccatagttacggcgccgatctaaagtcatttgacttaggcgacgagcttggcactgatccttatgaagattttcaagaaaactggaacactaaacatagcagtggtgttacccgtgaactcatgcgtgagcttaacggaggggcatacactcgctatgtcgataacaacttctgtggccctgatggctaccctcttgagtgcattaaagaccttctagcacgtgctggtaaagcttcatgcactttgtccgaacaactggactttattgacactaagaggggtgtatactgctgccgtgaacatgagcatgaaattgcttggtacacggaacgttctgaaaagagctatgaattgcagacaccttttgaaattaaattggcaaagaaatttgacaccttcaatggggaatgtccaaattttgtatttcccttaaattccataatcaagactattcaaccaagggttgaaaagaaaaagcttgatggctttatgggtagaattcgatctgtctatccagttgcgtcaccaaatgaatgcaaccaaatgtgcctttcaactctcatgaagtgtgatcattgtggtgaaacttcatggcagacgggcgattttgttaaagccacttgcgaattttgtggcactgagaatttgactaaagaaggtgccactacttgtggttacttaccccaaaatgctgttgttaaaatttattgtccagcatgtcacaattcagaagtaggacctgagcatagtcttgccgaataccataatgaatctggcttgaaaaccattcttcgtaagggtggtcgcactattgcctttggaggctgtgtgttctcttatgttggttgccataacaagtgtgcctattgggttccacgtgctagcgctaacataggttgtaaccatacaggtgttgttggagaaggttccgaaggtcttaatgacaaccttcttgaaatactccaaaaagagaaagtcaacatcaatattgttggtgactttaaacttaatgaagagatcgccattattttggcatctttttctgcttccacaagtgcttttgtggaaactgtgaaaggtttggattataaagcattcaaacaaattgttgaatcctgtggtaattttaaagttacaaaaggaaaagctaaaaaaggtgcctggaatattggtgaacagaaatcaatactgagtcctctttatgcatttgcatcagaggctgctcgtgttgtacgatcaattttctcccgcactcttgaaactgctcaaaattctgtgcgtgttttacagaaggccgctataacaatactagatggaatttcacagtattcactgagactcattgatgctatgatgttcacatctgatttggctactaacaatctagttgtaatggcctacattacaggtggtgttgttcagttgacttcgcagtggctaactaacatctttggcactgtttatgaaaaactcaaacccgtccttgattggcttgaagagaagtttaaggaaggtgtagagtttcttagagacggttgggaaattgttaaatttatctcaacctgtgcttgtgaaattgtcggtggacaaattgtcacctgtgcaaaggaaattaaggagagtgttcagacattctttaagcttgtaaataaatttttggctttgtgtgctgactctatcattattggtggagctaaacttaaagccttgaatttaggtgaaacatttgtcacgcactcaaagggattgtacagaaagtgtgttaaatccagagaagaaactggcctactcatgcctctaaaagccccaaaagaaattatcttcttagagggagaaacacttcccacagaagtgttaacagaggaagttgtcttgaaaactggtgatttacaaccattagaacaacctactagtgaagctgttgaagctccattggttggtacaccagtttgtattaacgggcttatgttgctcgaaatcaaagacacagaaaagtactgtgcccttgcacctaatatgatggtaacaaacaataccttcacactcaaaggcggtgcaccaacaaaggttacttttggtgatgacactgtgatagaagtgcaaggttacaagagtgtgaatatcacttttgaacttgatgaaaggattgataaagtacttaatgagaagtgctctgcctatacagttgaactcggtacagaagtaaatgagttcgcctgtgttgtggcagatgctgtcataaaaactttgcaaccagtatctgaattacttacaccactgggcattgatttagatgagtggagtatggctacatactacttatttgatgagtctggtgagtttaaattggcttcacatatgtattgttctttttaccctccagatgaggatgaagaagaaggtgattgtgaagaagaagagtttgagccatcaactcaatatgagtatggtactgaagatgattaccaaggtaaacctttggaatttggtgccacttctgctgctcttcaacctgaagaagagcaagaagaagattggttagatgatgatagtcaacaaactgttggtcaacaagacggcagtgaggacaatcagacaactactattcaaacaattgttgaggttcaacctcaattagagatggaacttacaccagttgttcagactattgaagtgaatagttttagtggttatttaaaacttactgacaatgtatacattaaaaatgcagacattgtggaagaagctaaaaaggtaaaaccaacagtggttgttaatgcagccaatgtttaccttaaacatggaggaggtgttgcaggagccttaaataaggctactaacaatgccatgcaagttgaatctgatgattacatagctactaatggaccacttaaagtgggtggtagttgtgttttaagcggacacaatcttgctaaacactgtcttcatgttgtcggcccaaatgttaacaaaggtgaagacattcaacttcttaagagtgcttatgaaaattttaatcagcacgaagttctacttgcaccattattatcagctggtatttttggtgctgaccctatacattctttaagagtttgtgtagatactgttcgcacaaatgtctacttagctgtctttgataaaaatctctatgacaaacttgtttcaagctttttggaaatgaagagtgaaaagcaagttgaacaaaagatcgctgagattcctaaagaggaagttaagccatttataactgaaagtaaaccttcagttgaacagagaaaacaagatgataagaaaatcaaagcttgtgttgaagaagttacaacaactctggaagaaactaagttcctcacagaaaacttgttactttatattgacattaatggcaatcttcatccagattctgccactcttgttagtgacattgacatcactttcttaaagaaagatgctccatatatagtgggtgatgttgttcaagagggtgttttaactgctgtggttatacctactaaaaaggctggtggcactactgaaatgctagcgaaagctttgagaaaagtgccaacagacaattatataaccacttacccgggtcagggtttaaatggttacactgtagaggaggcaaagacagtgcttaaaaagtgtaaaagtgccttttacattctaccatctattatctctaatgagaagcaagaaattcttggaactgtttcttggaatttgcgagaaatgcttgcacatgcagaagaaacacgcaaattaatgcctgtctgtgtggaaactaaagccatagtttcaactatacagcgtaaatataagggtattaaaatacaagagggtgtggttgattatggtgctagattttacttttacaccagtaaaacaactgtagcgtcacttatcaacacacttaacgatctaaatgaaactcttgttacaatgccacttggctatgtaacacatggcttaaatttggaagaagctgctcggtatatgagatctctcaaagtgccagctacagtttctgtttcttcacctgatgctgttacagcgtataatggttatcttacttcttcttctaaaacacctgaagaacattttattgaaaccatctcacttgctggttcctataaagattggtcctattctggacaatctacacaactaggtatagaatttcttaagagaggtgataaaagtgtatattacactagtaatcctaccacattccacctagatggtgaagttatcacctttgacaatcttaagacacttctttctttgagagaagtgaggactattaaggtgtttacaacagtagacaacattaacctccacacgcaagttgtggacatgtcaatgacatatggacaacagtttggtccaacttatttggatggagctgatgttactaaaataaaacctcataattcacatgaaggtaaaacattttatgttttacctaatgatgacactctacgtgttgaggcttttgagtactaccacacaactgatcctagttttctgggtaggtacatgtcagcattaaatcacactaaaaagtggaaatacccacaagttaatggtttaacttctattaaatgggcagataacaactgttatcttgccactgcattgttaacactccaacaaatagagttgaagtttaatccacctgctctacaagatgcttattacagagcaagggctggtgaagctgctaacttttgtgcacttatcttagcctactgtaataagacagtaggtgagttaggtgatgttagagaaacaatgagttacttgtttcaacatgccaatttagattcttgcaaaagagtcttgaacgtggtgtgtaaaacttgtggacaacagcagacaacccttaagggtgtagaagctgttatgtacatgggcacactttcttatgaacaatttaagaaaggtgttcagataccttgtacgtgtggtaaacaagctacaaaatatctagtacaacaggagtcaccttttgttatgatgtcagcaccacctgctcagtatgaacttaagcatggtacatttacttgtgctagtgagtacactggtaattaccagtgtggtcactataaacatataacttctaaagaaactttgtattgcatagacggtgctttacttacaaagtcctcagaatacaaaggtcctattacggatgttttctacaaagaaaacagttacacaacaaccataaaaccagttacttataaattggatggtgttgtttgtacagaaattgaccctaagttggacaattattataagaaagacaattnttatttcacagagcaaccaattgatcttgtaccaaaccaaccatatccaaacgcaagcttcgataattttaagtttgtatgtgataatatcaaatttgctgatgatttaaaccagttaactggttataagaaacctgcttcaagagagcttaaagttacatttttccctgacttaaatggtgatgtggtggctattgattataaacactacacaccctcttttaagaaaggagctaaattgttacataaacctattgtttggcatgttaacaatgcaactaataaagccacgtataaaccaaatacctggtgtatacgttgtctttggagcacaaaaccagttgaaacatcaaattcgtttgatgtactgaagtcagaggacgcgcagggaatggataatcttgcctgcgaagatctaaaaccagtctctgaagaagtagtggaaaatcctaccatacagaaagacgttcttgagtgtaatgtgaaaactaccgaagttgtaggagacattatacttaaaccagcaaataatagtttaaaaattacagaagaggttggccacacagatctaatggctgcttatgtagacaattctagtcttactattaagaaacctaatgaattatctagagtattaggtttgaaaacccttgctactcatggtttagctgctgttaatagtgtcccttgggatactatagctaattatgctaagccttttcttaacaaagttgttagtacaactactaacatagttacacggtgtttaaaccgtgtttgtactaattatatgccttatttctttactttattgctacaattgtgtacttttactagaagtacaaattctagaattaaagcatctatgccgactactatagcaaagaatactgttaagagtgtcggtaaattttgtctagaggcttcatttaattatttgaagtcacctaatttttctaaactgataaatattataatttggtttttactattaagtgtttgcctaggttctttaatctactcaaccgctgctttaggtgttttaatgtctaatttaggcatgccttcttactgtactggttacagagaaggctatttgaactctactaatgtcactattgcaacctactgtactggttctataccttgtagtgtttgtcttagtggtttagattctttagacacctatccttctttagaaactatacaaattaccatttcatcttttaaatgggatttaactgcttttggcttagttgcagagtggtttttggcatatattcttttcactaggtttttctatgtacttggattggctgcaatcatgcaattgtttttcagctattttgcagtacattttattagtaattcttggcttatgtggttaataattaatcttgtacaaatggccccgatttcagctatggttagaatgtacatcttctttgcatcattttattatgtatggaaaagttatgtgcatgttgtagacggttgtaattcatcaacttgtatgatgtgttacaaacgtaatagagcaacaagagtcgaatgtacaactattgttaatggtgttagaaggtccttttatgtctatgctaatggaggtaaaggcttttgcaaactacacaattggaattgtgttaattgtgatacattctgtgctggtagtacatttattagtgatgaagttgcgagagacttgtcactacagtttaaaagaccaataaatcctactgaccagtcttcttacatcgttgatagtgttacagtgaagaatggttccatccatctttactttgataaagctggtcaaaagacttatgaaagacattctctctctcattttgttaacttagacaacctgagagctaataacactaaaggttcattgcctattaatgttatagtttttgatggtaaatcaaaatgtgaagaatcatctgcaaaatcagcgtctgtttactacagtcagcttatgtgtcaacctatactgttactagatcaggcattagtgtctgatgttggtgatagtgcggaagttgcagttaaaatgtttgatgcttacgttaatacgttttcatcaacttttaacgtaccaatggaaaaactcaaaacactagttgcaactgcagaagctgaacttgcaaagaatgtgtccttagacaatgtcttatctacttttatttcagcagctcggcaagggtttgttgattcagatgtagaaactaaagatgttgttgaatgtcttaaattgtcacatcaatctgacatagaagttactggcgatagttgtaataactatatgctcacctataacaaagttgaaaacatgacaccccgtgaccttggtgcttgtattgactgtagtgcgcgtcatattaatgcgcaggtagcaaaaagtcacaacattgctttgatatggaacgttaaagatttcatgtcattgtctgaacaactacgaaaacaaatacgtagtgctgctaaaaagaataacttaccttttaagttgacatgtgcaactactagacaagttgttaatgttgtaacaacaaagatagcacttaagggtggtaaaattgttaataattggttgaagcagttaattaaagttacacttgtgttcctttttgttgctgctattttctatttaataacacctgttcatgtcatgtctaaacatactgacttttcaagtgaaatcataggatacaaggctattgatggtggtgtcactcgtgacatagcatctacagatacttgttttgctaacaaacatgctgattttgacacatggtttagccagcgtggtggtagttatactaatgacaaagcttgcccattgattgctgcagtcataacaagagaagtgggttttgtcgtgcctggtttgcctggcacgatattacgcacaactaatggtgactttttgcatttcttacctagagtttttagtgcagttggtaacatctgttacacaccatcaaaacttatagagtacactgactttgcaacatcagcttgtgttttggctgctgaatgtacaatttttaaagatgcttctggtaagccagtaccatattgttatgataccaatgtactagaaggttctgttgcttatgaaagtttacgccctgacacacgttatgtgctcatggatggctctattattcaatttcctaacacctaccttgaaggttctgttagagtggtaacaacttttgattctgagtactgtaggcacggcacttgtgaaagatcagaagctggtgtttgtgtatctactagtggtagatgggtacttaacaatgattattacagatctttaccaggagttttctgtggtgtagatgctgtaaatttacttactaatatgtttacaccactaattcaacctattggtgctttggacatatcagcatctatagtagctggtggtattgtagctatcgtagtaacatgccttgcctactattttatgaggtttagaagagcttttggtgaatacagtcatgtagttgcctttaatactttactattccttatgtcattcactgtactctgtttaacaccagtttactcattcttacctggtgtttattctgttatttacttgtacttgacattttatcttactaatgatgtttcnnttttagcacatattcagtggatggttatgttcacacctttagtacctttctggataacaattgcttatatcatttgtatttccacaaagcatttctattggttctttagtaattacctaaagagacgtgtagtctttaatggtgtttcctttagtacttttgaagaagctgcgctgtgcacctttttgttaaataaagaaatgtatctaaagttgcgtagtgatgtgctattacctcttacgcaatataatagatacttagctctttataataagtacaagtattttagtggagcaatggatacaactagctacagagaagctgcttgttgtcatctcgcaaaggctctcaatgacttcagtaactcaggttctgatgttctttaccaaccaccacaaacctctatcacctcagctgttttgcagagtggttttagaaaaatggcattcccatctggtaaagttgagggttgtatggtacaagtaacttgtggtacaactacacttaacggtctttggcttgatgacgtagtttactgtccaagacatgtgatctgcacctctgaagacatgcttaaccctaattatgaagatttactcattcgtaagtctaatcataatttcttggtacaggctggtaatgttcaactcagggttattggacattctatgcaaaattgtgtacttaagcttaaggttgatacagccaatcctaagacacctaagtataagtttgttcgcattcaaccaggacagactttttcagtgttagcttgttacaatggttcaccatctggtgtttaccaatgtgctatgaggcccaatttcactattaagggttcattccttaatggttcatgtggtagtgttggttttaacatagattatgactgtgtctctttttgttacatgcaccatatggaattaccaactggagttcatgctggcacagacttagaaggtaacttttatggaccttttgttgacaggcaaacagcacaagcagctggtacggacacaactattacagttaatgttttagcttggttgtacgctgctgttataaatggagacaggtggtttctcaatcgatttaccacaactcttaatgactttaaccttgtggctatgaagtacaattatgaacctctaacacaagaccatgttgacatactaggacctctttctgctcaaactggaattgccgttttagatatgtgtgcttcattaaaagaattactgcaaaatggtatgaatggacgtaccatattgggtagtgctttattagaagatgaatttacaccttttgatgttgttagacaatgctcaggtgttactttccaaagtgcagtgaaaagaacaatcaagggtacacaccactggttgttactcacaattttgacttcacttttagttttagtccagagtactcaatggtctttgttcttttttttgtatgaaaatgcctttttaccttttgctatgggtattattgctatgtctgcttttgcaatgatgtttgtcaaacataagcatgcatttctctgtttgtttttgttaccttctcttgccactgtagcttattttaatatggtctatatgcctgctagttgggtgatgcgtattatgacatggttggatatggttgatactagtttgtctggttttaagctaaaagactgtgttatgtatgcatcagctgtagtgttactaatccttatgacagcaagaactgtgtatgatgatggtgctaggagagtgtggacacttatgaatgtcttgacactcgtttataaagtttattatggtaatgctttagatcaagccatttccatgtgggctcttataatctctgttacttctaactactcaggtgtagttacaactgtcatgtttttggccagaggtattgtttttatgtgtgttgagtattgccctattttcttcataactggtaatacacttcagtgtataatgctagtttattgtttcttaggctatttttgtacttgttactttggcctcttttgtttactcaaccgctactttagactgactcttggtgtttatgattacttagtttctacacaggagtttagatatatgaattcacagggactactcccacccaagaatagcatagatgccttcaaactcaacattaaattgttgggtgttggtggcaaaccttgtatcaaagtagccactgtacagtctaaaatgtcagatgtaaagtgcacatcagtagtcttactctcagttttgcaacaactcagagtagaatcatcatctaaattgtgggctcaatgtgtccagttacacaatgacattctcttagctaaagatactactgaagcctttgaaaaaatggtttcactactttctgttttgctttccatgcagggtgctgtagacataaacaagctttgtgaagaaatgctggacaacagggcaaccttacaagctatagcctcagagtttagttcccttccatcatatgcagcttttgctactgctcaagaagcttatgagcaggctgttgctaatggtgattctgaagttgttcttaaaaagttgaagaagtctttgaatgtggctaaatctgaatttgaccgtgatgcagccatgcaacgtaagttggaaaagatggctgatcaagctatgacccaaatgtataaacaggctagatctgaggacaagagggcaaaagttactagtgctatgcagacaatgcttttcactatgcttagaaagttggataatgatgcactcaacaacattatcaacaatgcaagagatggttgtgttcccttgaacataatacctcttacaacagcagccaaactaatggttgtcataccagactataacacatataaaaatacgtgtgatggtacaacatttacttatgcatcagcattgtgggaaatccaacaggttgtagatgcagatagtaaaattgttcaacttagtgaaattagtatggacaattcacctaatttagcatggcctcttattgtaacagctttaagggccaattctgctgtcaaattacagaataatgagcttagtcctgttgcactacgacagatgtcttgtgctgccggtactacacaaactgcttgcactgatgacaatgcgttagcttactacaacacaacaaagggaggtaggtttgtacttgcactgttatccgatttacaggatttgaaatgggctagattccctaagagtgatggaactggtactatctatacagaactggaaccaccttgtaggtttgttacagacacacctaaaggtcctaaagtgaagtatttatactttattaaaggattaaacaacctaaatagaggtatggtacttggtagtttagctgccacagtacgtctacaagctggtaatgcaacagaagtgcctgccaattcaactgtattatctttctgtgcttttgctgtagatgctgctaaagcttacaaagattatctagctagtgggggacaaccaatcactaattgtgttaagatgttgtgtacacacactggtactggtcaggcaataacagttacaccggaagccaatatggatcaagaatcctttggtggtgcatcgtgttgtctgtactgccgttgccacatagatcatccaaatcctaaaggattttgtgacttaaaaggtaagtatgtacaaatacctacaacttgtgctaatgaccctgtgggttttacacttaaaaacacagtctgtaccgtctgcggtatgtggaaaggttatggctgtagttgtgatcaactccgcgaacccatgcttcagtcagctgatgcacaatcgtttttaaacgggtttgcggtgtaagtgcagcccgtcttacaccgtgcggcacaggcactagtactgatgtcgtatacagggcttttgacatctacaatgataaagtagctggttttgctaaattcctaaaaactaattgttgtcgcttccaagaaaaggacgaagatgacaatttaattgattcttactttgtagttaagagacacactttctctaactaccaacatgaagaaacaatttataatttacttaaggattgtccagctgttgctaaacatgacttctttaagtttagaatagacggtgacatggtaccacatatatcacgtcaacgtcttactaaatacacaatggcagacctcgtctatgctttaaggcattttgatgaaggtaattgtgacacattaaaagaaatacttgtcacatacaattgttgtgatgatgattatttcaataaaaaggactggtatgattttgtagaaaacccagatatattacgcgtatacgccaacttaggtgaacgtgtacgccaagctttgttaaaaacagtacaattctgtgatgccatgcgaaatgctggtattgttggtgtactgacattagataatcaagatctcaatggtaactggtatgatttcggtgatttcatacaaaccacgccaggtagtggagttcctgttgtagattcttattattcattgttaatgcctatattaaccttgaccagggctttaactgcagagtcacatgttgacactgacttaacaaagccttacattaagtgggatttgttaaaatatgacttcacggaagagaggttaaaactctttgaccgttattttaaatattgggatcagacataccacccaaattgtgttaactgtttggatgacagatgcattctgcattgtgcaaactttaatgttttattctctacagtgttcccacttacaagttttggaccactagtgagaaaaatatttgttgatggtgttccatttgtagtttcaactggataccacttcagagagctaggtgttgtacataatcaggatgtaaatttacatagctctagacttagttttaaggaattacttgtgtatgctgctgaccctgctatgcacgctgcttctggtaatctattactagataaacgcactacgtgcttttcagtagctgcacttactaacaatgttgcttttcaaactgtcaaacccggtaattttaacaaagacttctatgactttgctgtgtctaagggtttctttaaggaaggaagttctgttgaattaaaacacttcttctttgctcaggatggtaatgctgctatcagcgattatgactactatcgttataatctaccaacaatgtgtgatatcagacaactactatttgtagttgaagttgttgataagtactttgattgttacgatggtggctgtattaatgctaaccaagtcatcgtcaacaacctagacaaatcagctggttttccatttaataaatggggtaaggctagactttattatgattcaatgagttatgaggatcaagatgcacttttcgcatatacaaaacgtaatgtcatccctactataactcaaatgaatcttaagtatgccattagtgcaaagaatagagctcgcaccgtagctggtgtctctatctgtagtactatgaccaatagacagtttcatcaaaaattattgaaatcaatagccgccactagaggagctactgtagtaattggaacaagcaaattctatggtggttggcacaacatgttaaaaactgtttatagtgatgtagaaaaccctcaccttatgggttgggattatcctaaatgtgatagagccatgcctaayatgcttagaattatggcctcacttgttcttgctcgcaaacatacaacgtgttgtagcttgtcacaccgtttctatagattagctaatgagtgtgctcaagtattgagtgaaatggtcatgtgtggcggttcactatatgttaaaccaggtggaacctcatcaggagatgccacaactgcttatgctaatagtgtttttaacatttgtcaagctgtcacggccaatgttaatgcacttttatctactgatggtaacaaaattgccgataagtatgtccgcaatttacaacacagactttatgagtgtctctatagaaatagagatgttgacacagactttgtgaatgagttttacgcatatttgcgtaaacatttctcaatgatgatactctctgacgatgctgttgtgtgtttcaatagcacttatgcatctcaaggtctagtggctagcataaagaactttaagtcagttctttattatcaaaacaatgtttttatgtctgaagcaaaatgttggactgagactgaccttactaaaggacctcatgaattttgctctcaacatacaatgctagttaaacagggtgatgattatgtgtaccttccttacccagatccatcaagaatcctaggggccggctgttttgtagatgatatcgtaaaaacagatggtacacttatgattgaacggttcgtgtctttagctatagatgcttacccacttactaaacatcctaatcaggagtatgctgatgtctttcatttgtacttacaatacataagaaagctacatgatgagttaacaggacacatgttagacatgtattctgttatgcttactaatgataacacttcaaggtattgggaacctgagttttatgaggctatgtacacaccgcatacagtcttacaggctgttggggcttgtgttctttgcaattcacagacttcattaagatgtggtgcttgcatacgtagaccattcttatgttgtaaatgctgttacgaccatgtcatatcaacatcacataaattagtcttgtctgttaatccgtatgtttgcaatgctccaggttgtgatgtcacagatgtgactcaactttacttaggaggtatgagctattattgtaaatcacataaaccacccattagttttccattgtgtgctaatggacaagtttttggtttatataaaaatacatgtgttggtagcgataatgttactgactttaatgcaattgcaacatgtgactggacaaatgctggtgattacattttagctaacacctgtactgaaagactcaagctttttgcagcagaaacgctcaaagctactgaggagacatttaaactgtcttatggtattgctactgtacgtgaagtgctgtctgacagagaattacatctttcatgggaagttggtaaacctagaccaccacttaaccgaaattatgtctttactggttatcgtgtaactaaaaacagtaaagtacaaataggagagtacacctttgaaaaaggtgactatggtgatgctgttgtttaccgaggtacaacaacttacaaattaaatgttggtgattattttgtgctgacatcacatacagtaatgccattaagtgcacctacactagtgccacaagagcactatgttagaattactggcttatacccaacactcaatatctcagatgagttttctagcaatgttgcaaattatcaaaaggttggtatgcaaaagtattctacactccagggaccacctggtactggtaagagtcattttgctattggcctagctctctactacccttctgctcgcatagtgtatacagcttgctctcatgccgctgttgatgcactatgtgagaaggcattaaaatatttgcctatagataaatgtagtagaattatacctgcacgtgctcgtgtagagtgttttgataaattcaaagtgaattcaacattagaacagtatgtcttttgtactgtaaatgcattgcctgagacgacagcagatatagttgtctttgatgaaatttcaatggccacaaattatgatttgagtgttgtcaatgccagattacgtgctaagcactatgtgtacattggcgaccctgctcaattacctgcaccacgcacattgctaactaagggcacactagaaccagaatatttcaattcagtgtgtagacttatgaaaactataggtccagacatgttcctcggaacttgtcggcgttgtcctgctgaaattgttgacactgtgagtgctttggtttatgataataagcttaaagcacataaagacaaatcagctcaatgctttaaaatgttttataagggtgttatcacgcatgatgtttcatctgcaattaacaggccacaaataggcgtggtaagagaattccttacacgtaaccctgcttggagaaaagctgtctttatttcaccttataattcacagaatgctgtagcctcaaagattttgggactaccaactcaaactgttgattcatcacagggctcagaatatgactatgtcatattcactcaaaccactgaaacagctcactcttgtaatgtaaacagatttaatgttgctattaccagagcaaaagtaggcatactttgcataatgtctgatagagacctttatgacaagttgcaatttacaagtcttgaaattccacgtaggaatgtggcaactttacaagctgaaaatgtaacaggactctttaaagattgtagtaaggtaatcactgggttacatcctacacaggcacctacacacctcagtgttgacactaaattcaaaactgaaggtttatgtgttgacatacctggcatacctaaggacatgacctatagaagactcatctctatgatgggttttaaaatgaattatcaagttaatggttaccctaacatgtttatcacccgcgaagaagctataagacatgtacgtgcatggattggcttcgatgtcgaggggtgtcatgctactagagaagctgttggtaccaatttacctttacagctaggtttttctacaggtgttaacctagttgctgtacctacaggttatgttgatacacctaataatacagatttttccagagttagtgctaaaccaccgcctggagatcaatttaaacacctcataccacttatgtacaaaggacttccttggaatgtagtgcgtataaagattgtacaaatgttaagtgacacacttaaaaatctctctgacagagtcgtatttgtcttatgggcacatggctttgagttgacatctatgaagtattttgtgaaaataggacctgagcgcacctgttgtctatgtgatagacgtgccacatgcttttccactgcttcagacacttatgcctgttggcatcattctattggatttgattacgtctataatccgtttatgattgatgttcaacaatggggttttacaggtaacctacaaagcaaccatgatctgtattgtcaagtccatggtaatgcacatgtagctagttgtgatgcaatcatgactaggtgtctagctgtccacgagtgctttgttaagcgtgttgactggactattgaatatcctataattggtgatgaactgaagattaatgcggcttgtagaaaggttcaacacatggttgttaaagctgcattattagcagacaaattcccagttcttcacgacattggtaaccctaaagctattaagtgtgtacctcaagctgatgtagaatggaagttctatgatgcacagccttgtagtgacaaagcttataaaatagaagaattattctattcttatgccacacattctgacaaattcacagatggtgtatgcctattttggaattgcaatgtcgatagatatcctgctaattccattgtttgtagatttgacactagagtgctatctaaccttaacttgcctggttgtgatggtggcagtttgtatgtaaataaacatgcattccacacaccagcttttgataaaagtgcttttgttaatttaaaacaattaccatttttctattactctgacagtccatgtgagtctcatggaaaacaagtagtgtcagatatagattatgtaccactaaagtctgctacgtgtataacacgttgcaatttaggtggtgctgtctgtagacatcatgctaatgagtacagattgtatctcgatgcttataacatgatgatctcagctggctttagcttgtgggtttacaaacaatttgatacttataacctctggaacacttttacaagacttcagagtttagaaaatgtggcttttaatgttgtaaataagggacactttgatggacaacagggtgaagtaccagtttctatcattaataacactgtttacacaaaagttgatggtgttgatgtagaattgtttgaaaataaaacaacattacctgttaatgtagcatttgagctttgggctaagcgcaacattaaaccagtaccagaggtgaaaatactcaataatttgggtgtggacattgctgctaatactgtgatctgggactacaaaagagatgctccagcacatatatctactattggtgtttgttctatgactgacatagccaagaaaccaactgaaacgatttgtgcaccactcactgtcttttttgatggtagagttgatggtcaagtagacttatttagaaatgcccgtaatggtgttcttattacagaaggtagtgttaaaggtttacaaccatctgtaggtcccaaacaagctagtcttaatggagtcacattaattggagaagccgtaaaaacacagttcaattattataagaaagttgatggtgttgtccaacaattacctgaaacttactttactcagagtagaaatttacaagaatttanacccaggagtcaaatggaaattgatttcttagaattagctatggatgaattcattgaacggtataaattagaaggctatgccttcgaacatatcgtttatggagattttagtcatagtcagttaggtggtttacatctactgattggactagctaaacgttttaaggaatcaccttttgaattagaagattttattcctatggacagtacagttaaaaactatttcataacagatgcgcaaacaggttcatctaagtgtgtgtgttctgttattgatttattacttgatgattnngttgaaataataaaatcccaagatttatctgtagtttctaaggttgtcaaagtgactattgactatacagaaatttcatttatgctttggtgtaaagatggccatgtagaaacattttacccaaaattacaatctagtcaagcgtggcaaccgggtgttgctatgcctaatctttacaaaatgcaaagaatgctattagaaaagtgtgaccttcaaaattatggtgatagtgcaacattacctaaaggcataatgatgaatgtcgcaaaatatactcaactgtgtcaatatttaaacacattaacattagctgtaccctataatatgagagttatacattttggtgctggttctgataaaggagttgcaccaggtacagctgttttaagacagtggttgcctacgggtacgctgcttgtcgactcagatcttaatgactttgtctctgatgcagattcaactttgattggtgattgtgcaactgtacatacagctaataaatgggatctcattattagtgatatgtacgaccctaagactaaaaatgttacaaaagaaaatgactctaaagagggttttttcacttacatttgtgggtttatacaacaaaagctagctcttggaggttccgtggctataaagataacagaacattcttggaatgctgatctttataagctcatgggacacttcgcatggtggacagcctttgttactaatgtgaatgcgtcatcatctgaagcatttttaattggatgtaattatcttggcaaaccacgcgaacaaatagatggttatgtcatgcatgcaaattacatattttggaggaatacaaatccaattcagttgtcttcctattctttatttgacatgagtaaatttccccttaaattaaggggtactgctgttatgtctttaaaagaaggtcaaatcaatgatatgattttatctcttcttagtaaaggtagacttataattagagaaaacaacagagttgttatttctagtgatgttcttgttaacaactaaacgaacaatgtttgtttttcttgttttattgccactagtctctagtcagtgtgttaatcttacaamcagaactcaattacccyctgcatacactaattctttcacacgtggtgtttattaccctgacaaagttttcagatcctcagttttacattcaactcaggacttgttcttacctttcttttccaatgttacttggttccatgctatacatgtctctgggaccaatggtactaagaggtttgataaccctgtcctaccatttaatgatggtgtttattttgcttccactgagaagtctaacataataagaggctggatttttggtactactttagattcgaagacccagtccctacttattgttaataacgctactaatgttgttattaaagtctgtgaatttcaattttgtaatgatccatttttgggtgtttattaccacaaaaacaacaaaagttggatggaaagtgagttcagagtttattctagtgcgaataattgcacttttgaatatgtctctcagccttttcttatggaccttgaaggaaaacagggtaatttcaaaaatcttagggaatttgtgtttaagaatattgatggttattttaaaatatattctaagcacacgcctattaatttagtgcgtgatctccctcagggtttttcggctttagaaccattggtagatttgccaataggtattaacatcactaggtttcaaactttacttgctttacatagaagttatttgactcctggtgattcttcttcaggttggacagctggtgctgcagcttattatgtgggttatcttcaacctaggacttttctattaaaatataatgaaaatggaaccattacagatgctgtagactgtgcacttgaccctctctcagaaacaaagtgtacgttgaaatccttcactgtagaaaaaggaatctatcaaacttctaactttagagtccaaccaacagaatctattgttagatttcctaatattacaaacttgtgcccttttggtgaagtttttaacgccaccagatttgcatctgtttatgcttggaacaggaagagaatcagcaactgtgttgctgattattctgtcctatataattccgcatcattttccacttttaagtgttatggagtgtctcctactaaattaaatgatctctgctttactaatgtctatgcagattcatttgtaattagaggtgatgaagtcagacaaatcgctccagggcaaactggaaagattgctgattataattataaattaccagatgattttacaggctgcgttatagcttggaattctaacaatcttgattctaaggttggtggtaattataattacctgtatagattgtttaggaagtctaatctcaaaccttttgagagagatatttcaactgaaatctatcaggccggtagcacaccttgtaatggtgttgaaggttttaattgttactttcctttacaatcatatggtttccaacccactaatggtgttggttaccaaccatacagagtagtagtactttcttttgaacttctacatgcaccagcaactgtttgtggacctaaaaagtctactaatttggttaaaaacaaatgtgtcaatttcaacttcaatggtttaacaggcacaggtgttcttactgagtctaacaaaaagtttctgcctttccaacaatttggcagagacattgctgacactactgatgctgtccgtgatccacagacacttgagattcttgacattacaccatgttcttttggtggtgtcagtgttataacaccaggaacaaatacttctaaccaggttgctgttctttatcagggtgttaactgcacagaagtccctgttgctattcatgcagatcaacttactcctacttggcgtgtttattctacaggttctaatgtttttcaaacacgtgcaggctgtttaataggggctgaacatgtcaacaactcatatgagtgtgacatacccattggtgcaggtatatgcgctagttatcagactcagactaattctcctcggcgggcacgtagtgtagctagtcaatccatcattgcctacactatgtcacttggtgcagaaaattcagttgcttactctaataactctattgccatacccacaaattttactattagtgttaccacagaaattctaccagtgtctatgaccaagacatcagtagattgtacaatgtacatttgtggtgattcaactgaatgcagcaatcttttgttgcaatatggcagtttttgtacacaattaaaccgtgctttaactggaatagctgttgaacaagacaaaaacacccaagaagtttttgcacaagtcaaacaaatttacaaaacaccaccaattaaagattttggtggttttaatttttcacaaatattaccagatccatcaaaaccaagcaagaggtcatttattgaagatctacttttcaacaaagtgacacttgcagatgctggcttcatcaaacaatatggtgattgccttggtgatattgctgctagagacctcatttgtgcacaaaagtttaacggccttactgttttgccacctttgctcacagatgaaatgattgctcaatacacttctgcactgttagcgggtacaatcacttctggttggacctttggtgcaggtgctgcattacaaataccatttgctatgcaaatggcttataggtttaatggtattggagttacacagaatgttctctatgagaaccaaaaattgattgccaaccaatttaatagtgctattggcaaaattcaagactcactttcttccacagcaagtgcacttggaaaacttcaagatgtggtcaaccaaaatgcacaagctttaaacacgcttgttaaacaacttagctccaattttggtgcaatttcaagtgttttaaatgatatcctttcacgtcttgacaaagttgaggctgaagtgcaaattgataggttgatcacaggcagacttcaaagtttgcagacatatgtgactcaacaattaattagagctgcagaaatcagagcttctgctaatcttgctgctactaaaatgtcagagtgtgtacttggacaatcaaaaagagttgatttttgtggaaagggctatcatcttatgtccttccctcagtcagcacctcatggtgtagtcttcttgcatgtgacttatgtccctgcacaagaaaagaacttcacaactgctcctgccatttgtcatgatggaaaagcacactttcctcgtgaaggtgtctttgtttcaaatggcacacactggtttgtaacacaaaggaatttttatgaaccacaaatcattactacagacaacacatttgtgtctggtaactgtgatgttgtaataggaattgtcaacaacacagtttatgatcctttgcaacctgaattagactcattcaaggaggagttagataaatattttaagaatcatacatcaccagatgttgatttaggtgacatctctggcattaatgcttcagttgtaaacattcaaaaagaaattgaccgcctcaatgaggttgccaagaatttaaatgaatctctcatcgatctccaagaacttggaaagtatgagcagtatataaaatggccatggtacatttggctaggttttatagctggcttgattgccatagtaatggtgacaattatgctttgctgtatgaccagttgctgtagttgtctcaagggctgttgttcttgtggatcctgctgcaaatttgatgaagacgactctgagccagtgctcaaaggagtcaaattacattacacataaacgaacttatggatttgtttatgagaatcttcacaattggaactgtaactttgaagcaaggtgaaatcaaggatgctactccttcagattttgttcgcgctactgcaacgataccgatacaagcctcactccctttcggatggcttattgttggcgttgcacttcttgctgtttttcagagcgcttccaaaatcataaccctcaaaaagagatggcaactagcactctccaagggtgttcactttgtttgcaacttgctgttgttgtttgtaacagtttactcacaccttttgctcgttgctgctggccttgaagccccttttctctatctttatgctttagtctacttcttgcagagtataaactttgtaagaataataatgmggctttggctttgctggaaatgccgttccaaaaacccattactttatgatgccaactattttctttgctggcatactaattgttacgactattgtataccttacaatagtgtaacttcttcaattgtcattacttcaggtgatggcacaacaagtcctatttctgaacatgactaccagattggtggttatactgaaaaatgggaatctggagtaaaagactgtgttgtattacacagttacttcacttcagactattaccagctgtactcaactcaattgagtacagacactggtgttgaacatgttaccttcttcatctacaataaaattgttgatgagcctgaagaacatgtccaaattcacacaatcgacggttcatccggagttgttaatccagtaatggaaccaatttatgatgaaccgacgacgactactagcgtgcctttgtaagcacaagctgatgagtacgaacttatgtactcattcgtttcggaagagacaggtacgttaatagttaatagcgtacttctttttcttgctttcgtggtattcttgctagttacactagccatccttactgcgcttcgattgtgtgcgtactgctgcaatattgttaacgtgagtcttgtaaaaccttctttttacgtttactctcgtgttaaaaatctgaattcttctagagttcctgatcttccggtctaaacgaactaaatattatattagtttttctgtttggaactttaattttagccatggcagattccaacggtactattaccgttgaagagcttaaaaagctccttgaacaatggaacctagtaataggtttcctattccttacatggatttgtcttctacaatttgcctatgccaacaggaataggtttttgtatataattaagttaattttcctctggctgttatggccagtaactttagcttgttttgtgcttgctgctgtttacagaataaattggatcaccggtggaattgctatcgcaatggcttgtcttgtaggcttgatgtggctcagctacttcattgcttctttcagactgtttgcgcgtacgcgttccatgtggtcattcaatccagaaactaacattcttctcaacgtgccactccatggcactattctgaccagaccgcttctagaaagtgaactcgtaatcggagctgtgatccttcgtggacatcttcgtattgctggacaccatctaggacgctgtgacatcaaggacctgcctaaagaaatcactgttgctacatcacgaacgctttcttattacaaattgggagcttcgcagcgtgtagcaggtgactcaggttttgctgcatacagtcgctacaggattggcaactataaattaaacacagaccattccagtagcagtgacaatattgctttgcttgtacagtaagtgacaacagatgtttcatctcgttgactttcaggttactatagcagagatattactaattattatgaggacttttaaagtttccatttggaatcttgattacatcataaacctcataattaaaaatttatctaagtcactaactgagaataaatattctcaattagatgaagagcaaccaatggagattgattaaacgaacatgaaaattattcttttcttggcactgataacactcgctacttgtgagctttatcactaccaagagtgtgttagaggtacaacagtacttttaaaagaaccttgctcttctggaacatacgagggcaattcaccatttcatcctctagctgataacaaatttgcactgacttgctttagcactcaatttgcttttgcttgtcctgacggcgtaaaacacgtctatcagttacgtgccagatcagtttcacctaaactgttcatcagacaagaggaagttcaagaactttactctccaatttttcttattgttgcggcaatagtgtttataacactttgcttcacactcaaaagaaagacagaatgattgaactttcattaattgacttctatttgtgctttttagcctttctgctattccttgttttaattatgcttattatcttttggttctcacttgaactgcaagatcataatgaaacttgtcacgcctaaacgaacatgaaatttcttgttttcttaggaatcatcacaactgtagctgcatttcaccaagaatgtagtttacagtcatgtactcaacatcaaccatatgtagttgatgacccgtgtcctattcacttctattctaaatggtatattagagtaggagctagaaaatcagcacctttaattgaattgtgcgtggatgaggctggttctaaatcacccattcagtacatcgatatcggtaattatacagtttcctgtttaccttttacaattaattgccaggaacctaaattgggtagtcttgtagtgcgttgttcgttctatgaagactttttagagtatcatgacgttcgtgttgttttagatttcatctaaacgaacaaactaaaatgtctgataatggaccccaaaatcagcgaaatgcaccccgcattacgtttggtggaccctcagattcaactggcagtaaccagaatggagaacgcagtggggcgcgatcaaaacaacgtcggccccaaggtttacccaataatactgcgtcttggttcaccgctctcactcaacatggcaaggaagaccttaaattccctcgaggacaaggcgttccaattaacaccaatagcagtccagatgaccaaattggctactaccgaagagctaccagacgaattcgtggtggtgacggtaaaatgaaagatctcagtccaagatggtatttctactacctaggaactgggccagaagctggacttccctatggtgctaacaaagacggcatcatatgggttgcaactgagggagccttgaatacaccaaaagatcacattggcacccgcaatcctgctaacaatgctgcaatcgtgctacaacttcctcaaggaacaacattgccaaaaggcttctacgcagaagggagcagaggcggcagtcaagcctcttctcgttcctcatcacgtagtcgcaacagttcaagaaattcaactccaggcagcagtaggggaacttctcctgctagaatggctggcaatggcggtgatgctgctcttgctttgctgctgcttgacagattgaaccagcttgagagcaaaatgtctggtaaaggccaacaacaacaaggccaaactgtcactaagaaatctgctgctgaggcttctaagaagcctcggcaaaaacgtactgccactaaagcatacaatgtaacacaagctttcggcagacgtggtccagaacaaacccaaggaaattttggggaccaggaactaatcagacaaggaactgattacaaacattggccgcaaattgcacaatttgcccccagcgcttcagcgttcttcggaatgtcgcgcattggcatggaagtcacaccttcgggaacgtggttgacctacacaggtgccatcaaattggatgacaaagatccaaatttcaaagatcaagtcattttgctgaataagcatattgacgcatacaaaacattcccaccaacagagcctaaaaaggacaaaaagaagaaggctgatgaaactcaagccttaccgcagagacagaagaaacagcaaactgtgactcttcttcctgctgcagatttggatgatttctccaaacaattgcaacaatccatgagcagtgctgactcaactcaggcctaaactcatgcagaccacacaaggcagatgggctatataaacgttttcgcttttccgtttacgatatatagtctactcttgtgcagaatgaattctcgtaactacatagcacaagtagatgtagttaactttaatctcacatagcaatctttaatcagtgtgtaacattagggaggacttgaa

SEQ ID NO: 43 - DNA, 29700 bp, synthetic construct
  misc_feature 1..29700: note = Reconstituted virus 6
  source 1..29700: mol_type = other DNA
accttcccaggtaacaaaccaaccaactttcgatctcttgtagatctgttctctaaacgaactttaaaatctgtgtggctgtcactcggctgcatgcttagtgcactcacgcagtataattaataactaattactgtcgttgacaggacacgagtaactcgtctatcttctgcaggctgcttacggtttcgtccgtgttgcagccgatcatcagcacatctaggttttgtccgggtgtgaccgaaaggtaagatggagagccttgtccctggtttcaacgagaaaacacacgtccaactcagtttgcctgttttacaggttcgcgacgtgctcgtacgtggctttggagactccgtggaggaggtcttatcagaggcacgtcaacatcttaaagatggcacttgtggcttagtagaagttgaaaaaggcgttttgcctcaacttgaacagccctatgtgttcatcaaacgttcggatgctcgaactgcacctcatggtcatgttatggttgagctggtagcagaactcgaaggcattcagtacggtcgtagtggtgagacacttggtgtccttgtccctcatgtgggcgaaataccagtggcttaccgcaaggttcttcttcgtaagaacggtaataaaggagctggtggccatagttacggcgccgatctaaagtcatttgacttaggcgacgagcttggcactgatccttatgaagattttcaagaaaactggaacactaaacatagcagtggtgttacccgtgaactcatgcgtgagcttaacggaggggcatacactcgctatgtcgataacaacttctgtggccctgatggctaccctcttgagtgcattaaagaccttctagcacgtgctggtaaagcttcatgcactttgtccgaacaactggactttattgacactaagaggggtgtatactgctgccgtgaacatgagcatgaaattgcttggtacacggaacgttctgaaaagagctatgaattgcagacaccttttgaaattaaattggcaaagaaatttgacaccttcaatggggaatgtccaaattttgtatttcccttaaattccataatcaagactattcaaccaagggttgaaaagaaaaagcttgatggctttatgggtagaattcgatctgtctatccagttgcgtcaccaaatgaatgcaaccaaatgtgcctttcaactctcatgaagtgtgatcattgtggtgaaacttcatggcagacgggcgattttgttaaagccacttgcgaattttgtggcactgagaatttgactaaagaaggtgccactacttgtggttacttaccccaaaatgctgttgttaaaatttattgtccagcatgtcacaattcagaagtaggacctgagcatagtcttgccgaataccataatgaatctggcttgaaaaccattcttcgtaagggtggtcgcactattgcctttggaggctgtgtgttctcttatgttggttgccataacaagtgtgcctattgggttccacgtgctagcgctaacataggttgtaaccatacaggtgttgttggagaaggttccgaaggtcttaatgacaaccttcttgaaatactccaaaaagagaaagtcaacatcaatattgttggtgactttaaacttaatgaagagatcgccattattttggcatctttttctgcttccacaagtgcttttgtggaaactgtgaaaggtttggattataaagcattcaaacaaattgttgaatcctgtggtaattttaaagttacaaaaggaaaagctaaaaaaggtgcctggaatattggtgaacagaaatcaatactgagtcctctttatgcatttgcatcagaggctgctcgtgttgtacgatcaattttctcccgcactcttgaaactgctcaaaattctgtgcgtgttttacagaaggccgctataacaatactagatggaatttcacagtattcactgagactcattgatgctatgatgttcacatctgatttggctactaacaatctagttgtaatggcctacattacaggtggtgttgttcagttgacttcgcagtggctaactaacatctttggcactgtttatgaaaaactcaaacccgtccttgattggcttgaagagaagtttaaggaaggtgtagagtttcttagagacggttgggaaattgttaaatttatctcaacctgtgcttgtgaaattgtcggtggacaaattgtcacctgtgcaaaggaaattaaggagagtgttcagacattctttaagcttgtaaataaatttttggctttgtgtgctgactctatcattattggtggagctaaacttaaagccttgaatttaggtgaaacatttgtcacgcactcaaagggattgtacagaaagtgtgttaaatccagagaagaaactggcctactcatgcctctaaaagccccaaaagaaattatcttcttagagggagaaacacttcccacagaagtgttaacagaggaagttgtcttgaaaactggtgatttacaaccattagaacaacctactagtgaagctgttgaagctccattggttggtacaccagtttgtattaacgggcttatgttgctcgaaatcaaagacacagaaaagtactgtgcccttgcacctaatatgatggtaacaaacaataccttcacactcaaaggcggtgcaccaacaaaggttacttttggtgatgacactgtgatagaagtgcaaggttacaagagtgtgaatatcacttttgaacttgatgaaaggattgataaagtacttaatgagaagtgctctgcctatacagttgaactcggtacagaagtaaatgagttcgcctgtgttgtggcagatgctgtcataaaaactttgcaaccagtatctgaattacttacaccactgggcattgatttagatgagtggagtatggctacatactacttatttgatgagtctggtgagtttaaattggcttcacatatgtattgttctttttaccctccagatgaggatgaagaagaaggtgattgtgaagaagaagagtttgagccatcaactcaatatgagtatggtactgaagatgattaccaaggtaaacctttggaatttggtgccacttctgctgctcttcaacctgaagaagagcaagaagaagattggttagatgatgatagtcaacaaactgttggtcaacaagacggcagtgaggacaatcagacaactactattcaaacaattgttgaggttcaacctcaattagagatggaacttacaccagttgttcagactattgaagtgaatagttttagtggttatttaaaacttactgacaatgtatacattaaaaatgcagacattgtggaagaagctaaaaaggtaaaaccaacagtggttgttaatgcagccaatgtttaccttaaacatggaggaggtgttgcaggagccttaaataaggctactaacaatgccatgcaagttgaatctgatgattacatagctactaatggaccacttaaagtgggtggtagttgtgttttaagcggacacaatcttgctaaacactgtcttcatgttgtcggcccaaatgttaacaaaggtgaagacattcaacttcttaagagtgcttatgaaaattttaatcagcacgaagttctacttgcaccattattatcagctggtatttttggtgctgaccctatacattctttaagagtttgtgtagatactgttcgcacaaatgtctacttagctgtctttgataaaaatctctatgacaaacttgtttcaagctttttggaaatgaagagtgaaaagcaagttgaacaaaagatcgctgagattcctaaagaggaagttaagccatttataactgaaagtaaaccttcagttgaacagagaaaacaagatgataagaaaatcaaagcttgtgttgaagaagttacaacaactctggaagaaactaagttcctcacagaaaacttgttactttatattgacattaatggcaatcttcatccagattctgccactcttgttagtgacattgacatcactttcttaaagaaagatgctccatatatagtgggtgatgttgttcaagagggtgttttaactgctgtggttatacctactaaaaaggctggtggcactactgaaatgctagcgaaagctttgagaaaagtgccaacagacaattatataaccacttacccgggtcagggtttaaatggttacactgtagaggaggcaaagacagtgcttaaaaagtgtaaaagtgccttttacattctaccatctattatctctaatgagaagcaagaaattcttggaactgtttcttggaatttgcgagaaatgcttgcacatgcagaagaaacacgcaaattaatgcctgtctgtgtggaaactaaagccatagtttcaactatacagcgtaaatataagggtattaaaatacaagagggtgtggttgattatggtgctagattttacttttacaccagtaaaacaactgtagcgtcacttatcaacacacttaacgatctaaatgaaactcttgttacaatgccacttggctatgtaacacatggcttaaatttggaagaagctgctcggtatatgagatctctcaaagtgccagctacagtttctgtttcttcacctgatgctgttacagcgtataatggttatcttacttcttcttctaaaacacctgaagaacattttattgaaaccatctcacttgctggttcctataaagattggtcctattctggacaatctacacaactaggtatagaatttcttaagagaggtgataaaagtgtatattacactagtaatcctaccacattccacctagatggtgaagttatcacctttgacaatcttaagacacttctttctttgagagaagtgaggactattaaggtgtttacaacagtagacaacattaacctccacacgcaagttgtggacatgtcaatgacatatggacaacagtttggtccaacttatttggatggagctgatgttactaaaataaaacctcataattcacatgaaggtaaaacattttatgttttacctaatgatgacactctacgtgttgaggcttttgagtactaccacacaactgatcctagttttctgggtaggtacatgtcagcattaaatcacactaaaaagtggaaatacccacaagttaatggtttaacttctattaaatgggcagataacaactgttatcttgccactgcattgttaacactccaacaaatagagttgaagtttaatccacctgctctacaagatgcttattacagagcaagggctggtgaagctgctaacttttgtgcacttatcttagcctactgtaataagacagtaggtgagttaggtgatgttagagaaacaatgagttacttgtttcaacatgccaatttagattcttgcaaaagagtcttgaacgtggtgtgtaaaacttgtggacaacagcagacaacccttaagggtgtagaagctgttatgtacatgggcacactttcttatgaacaatttaagaaaggtgttcagataccttgtacgtgtggtaaacaagctacaaaatatctagtacaacaggagtcaccttttgttatgatgtcagcaccacctgctcagtatgaacttaagcatggtacatttacttgtgctagtgagtacactggtaattaccagtgtggtcactataaacatataacttctaaagaaactttgtattgcatagacggtgctttacttacaaagtcctcagaatacaaaggtcctattacggatgttttctacaaagaaaacagttacacaacaaccataaaaccagttacttataaattggatggtgttgtttgtacagaaattgaccctaagttggacaattattataagaaagacaattcttatttcacagagcaaccaattgatcttgtaccaaaccaaccatatccaaacgcaagcttcgataattttaagtttgtatgtgataatatcaaatttgctgatgatttaaaccagttaactggttataagaaacctgcttcaagagagcttaaagttacatttttccctgacttaaatggtgatgtggtggctattgattataaacactacacaccctcttttaagaaaggagctaaattgttacataaacctattgtttggcatgttaacaatgcaactaataaagccacgtataaaccaaatacctggtgtatacgttgtctttggagcacaaaaccagttgaaacatcaaattcgtttgatgtactgaagtcagaggacgcgcagggaatggataatcttgcctgcgaagatctaaaaccagtctctgaagaagtagtggaaaatcctaccatacagaaagacgttcttgagtgtaatgtgaaaactaccgaagttgtaggagacattatacttaaaccagcaaataatagtttaaaaattacagaagaggttggccacacagatctaatggctgcttatgtagacaattctagtcttactattaagaaacctaatgaattatctagagtattaggtttgaaaacccttgctactcatggtttagctgctgttaatagtgtcccttgggatactatagctaattatgctaagccttttcttaacaaagttgttagtacaactactaacatagttacacggtgtttaaaccgtgtttgtactaattatatgccttatttctttactttattgctacaattgtgtacttttactagaagtacaaattctagaattaaagcatctatgccgactactatagcaaagaatactgttaagagtgtcggtaaattttgtctagaggcttcatttaattatttgaagtcacctaatttttctaaactgataaatattataatttggtttttactattaagtgtttgcctaggttctttaatctactcaaccgctgctttaggtgttttaatgtctaatttaggcatgccttcttactgtactggttacagagaaggctatttgaactctactaatgtcactattgcaacctactgtactggttctataccttgtagtgtttgtcttagtggtttagattctttagacacctatccttctttagaaactatacaaattaccatttcatcttttaaatgggatttaactgcttttggcttagttgcagagtggtttttggcatatattcttttcactaggtttttctatgtacttggattggctgcaatcatgcaattgtttttcagctattttgcagtacattttattagtaattcttggcttatgtggttaataattaatcttgtacaaatggccccgatttcagctatggttagaatgtacatcttctttgcatcattttattatgtatggaaaagttatgtgcatgttgtagacggttgtaattcatcaacttgtatgatgtgttacaaacgtaatagagcaacaagagtcgaatgtacaactattgttaatggtgttagaaggtccttttatgtctatgctaatggaggtaaaggcttttgcaaactacacaattggaattgtgttaattgtgatacattctgtgctggtagtacatttattagtgatgaagttgcgagagacttgtcactacagtttaaaagaccaataaatcctactgaccagtcttcttacatcgttgatagtgttacagtgaagaatggttccatccatctttactttgataaagctggtcaaaagacttatgaaagacattctctctctcattttgttaacttagacaacctgagagctaataacactaaaggttcattgcctattaatgttatagtttttgatggtaaatcaaaatgtgaagaatcatctgcaaaatcagcgtctgtttactacagtcagcttatgtgtcaacctatactgttactagatcaggcattagtgtctgatgttggtgatagtgcggaagttgcagttaaaatgtttgatgcttacgttaatacgttttcatcaacttttaacgtaccaatggaaaaactcaaaacactagttgcaactgcagaagctgaacttgcaaagaatgtgtccttagacaatgtcttatctacttttatttcagcagctcggcaagggtttgttgattcagatgtagaaactaaagatgttgttgaatgtcttaaattgtcacatcaatctgacatagaagttactggcgatagttgtaataactatatgctcacctataacaaagttgaaaacatgacaccccgtgaccttggtgcttgtattgactgtagtgcgcgtcatattaatgcgcaggtagcaaaaagtcacaacattgctttgatatggaacgttaaagatttcatgtcattgtctgaacaactacgaaaacaaatacgtagtgctgctaaaaagaataacttaccttttaagttgacatgtgcaactactagacaagttgttaatgttgtaacaacaaagatagcacttaagggtggtaaaattgttaataattggttgaagcagttaattaaagttacacttgtgttcctttttgttgctgctattttctatttaataacacctgttcatgtcatgtctaaacatactgacttttcaagtgaaatcataggatacaaggctattgatggtggtgtcactcgtgacatagcatctacagatacttgttttgctaacaaacatgctgattttgacacatggtttagccagcgtggtggtagttatactaatgacaaagcttgcccattgattgctgcagtcataacaagagaagtgggttttgtcgtgcctggtttgcctggcacgatattacgcacaactaatggtgactttttgcatttcttacctagagtttttagtgcagttggtaacatctgttacacaccatcaaaacttatagagtacactgactttgcaacatcagcttgtgttttggctgctgaatgtacaatttttaaagatgcttctggtaagccagtaccatattgttatgataccaatgtactagaaggttctgttgcttatgaaagtttacgccctgacacacgttatgtgctcatggatggctctattattcaatttcctaacacctaccttgaaggttctgttagagtggtaacaacttttgattctgagtactgtaggcacggcacttgtgaaagatcagaagctggtgtttgtgtatctactagtggtagatgggtacttaacaatgattattacagatctttaccaggagttttctgtggtgtagatgctgtaaatttacttactaatatgtttacaccactaattcaacctattggtgctttggacatatcagcatctatagtagctggtggtattgtagctatcgtagtaacatgccttgcctactattttatgaggtttagaagagcttttggtgaatacagtcatgtagttgcctttaatactttactattccttatgtcattcactgtactctgtttaacaccagtttactcattcttacctggtgtttattctgttatttacttgtacttgacattttatcttactaatgatgtttcttttttagcacatattcagtggatggttatgttcacacctttagtacctttctggataacaattgcttatatcatttgtatttccacaaagcatttctattggttctttagtaattacctaaagagacgtgtagtctttaatggtgtttcctttagtacttttgaagaagctgcgctgtgcacctttttgttaaataaagaaatgtatctaaagttgcgtagtgatgtgctattacctcttacgcaatataatagatacttagctctttataataagtacaagtattttagtggagcaatggatacaactagctacagagaagctgcttgttgtcatctcgcaaaggctctcaatgacttcagtaactcaggttctgatgttctttaccaaccaccacaaacctctatcacctcagctgttttgcagagtggttttagaaaaatggcattcccatctggtaaagttgagggttgtatggtacaagtaacttgtggtacaactacacttaacggtctttggcttgatgacgtagtttactgtccaagacatgtgatctgcacctctgaagacatgcttaaccctaattatgaagatttactcattcgtaagtctaatcataatttcttggtacaggctggtaatgttcaactcagggttattggacattctatgcaaaattgtgtacttaagcttaaggttgatacagccaatcctaagacacctaagtataagtttgttcgcattcaaccaggacagactttttcagtgttagcttgttacaatggttcaccatctggtgtttaccaatgtgctatgaggcccaatttcactattaagggttcattccttaatggttcatgtggtagtgttggttttaacatagattatgactgtgtctctttttgttacatgcaccatatggaattaccaactggagttcatgctggcacagacttagaaggtaacttttatggaccttttgttgacaggcaaacagcacaagcagctggtacggacacaactattacagttaatgttttagcttggttgtacgctgctgttataaatggagacaggtggtttctcaatcgatttaccacaactcttaatgactttaaccttgtggctatgaagtacaattatgaacctctaacacaagaccatgttgacatactaggacctctttctgctcaaactggaattgccgttttagatatgtgtgcttcattaaaagaattactgcaaaatggtatgaatggacgtaccatattgggtagtgctttattagaagatgaatttacaccttttgatgttgttagacaatgctcaggtgttactttccaaagtgcagtgaaaagaacaatcaagggtacacaccactggttgttactcacaattttgacttcacttttagttttagtccagagtactcaatggtctttgttcttttttttgtatgaaaatgcctttttaccttttgctatgggtattattgctatgtctgcttttgcaatgatgtttgtcaaacataagcatgcatttctctgtttgtttttgttaccttctcttgccactgtagcttattttaatatggtctatatgcctgctagttgggtgatgcgtattatgacatggttggatatggttgatactagtttgtctggttttaagctaaaagactgtgttatgtatgcatcagctgtagtgttactaatccttatgacagcaagaactgtgtatgatgatggtgctaggagagtgtggacacttatgaatgtcttgacactcgtttataaagtttattatggtaatgctttagatcaagccatttccatgtgggctcttataatctctgttacttctaactactcaggtgtagttacaactgtcatgtttttggccagaggtattgtttttatgtgtgttgagtattgccctattttcttcataactggtaatacacttcagtgtataatgctagtttattgtttcttaggctatttttgtacttgttactttggcctcttttgtttactcaaccgctactttagactgactcttggtgtttatgattacttagtttctacacaggagtttagatatatgaattcacagggactactcccacccaagaatagcatagatgccttcaaactcaacattaaattgttgggtgttggtggcaaaccttgtatcaaagtagccactgtacagtctaaaatgtcagatgtaaagtgcacatcagtagtcttactctcagttttgcaacaactcagagtagaatcatcatctaaattgtgggctcaatgtgtccagttacacaatgacattctcttagctaaagatactactgaagcctttgaaaaaatggtttcactactttctgttttgctttccatgcagggtgctgtagacataaacaagctttgtgaagaaatgctggacaacagggcaaccttacaagctatagcctcagagtttagttcccttccatcatatgcagcttttgctactgctcaagaagcttatgagcaggctgttgctaatggtgattctgaagttgttcttaaaaagttgaagaagtctttgaatgtggctaaatctgaatttgaccgtgatgcagccatgcaacgtaagttggaaaagatggctgatcaagctatgacccaaatgtataaacaggctagatctgaggacaagagggcaaaagttactagtgctatgcagacaatgcttttcactatgcttagaaagttggataatgatgcactcaacaacattatcaacaatgcaagagatggttgtgttcccttgaacataatacctcttacaacagcagccaaactaatggttgtcataccagactataacacatataaaaatacgtgtgatggtacaacatttacttatgcatcagcattgtgggaaatccaacaggttgtagatgcagatagtaaaattgttcaacttagtgaaattagtatggacaattcacctaatttagcatggcctcttattgtaacagctttaagggccaattctgctgtcaaattacagaataatgagcttagtcctgttgcactacgacagatgtcttgtgctgccggtactacacaaactgcttgcactgatgacaatgcgttagcttactacaacacaacaaagggaggtaggtttgtacttgcactgttatccgatttacaggatttgaaatgggctagattccctaagagtgatggaactggtactatctatacagaactggaaccaccttgtaggtttgttacagacacacctaaaggtcctaaagtgaagtatttatactttattaaaggattaaacaacctaaatagaggtatggtacttggtagtttagctgccacagtacgtctacaagctggtaatgcaacagaagtgcctgccaattcaactgtattatctttctgtgcttttgctgtagatgctgctaaagcttacaaagattatctagctagtgggggacaaccaatcactaattgtgttaagatgttgtgtacacacactggtactggtcaggcaataacagttacaccggaagccaatatggatcaagaatcctttggtggtgcatcgtgttgtctgtactgccgttgccacatagatcatccaaatcctaaaggattttgtgacttaaaaggtaagtatgtacaaatacctacaacttgtgctaatgaccctgtgggttttacacttaaaaacacagtctgtaccgtctgcggtatgtggaaaggttatggctgtagttgtgatcaactccgcgaacccatgcttcagtcagctgatgcacaatcgtttttaaacgggtttgcggtgtaagtgcagcccgtcttacaccgtgcggcacaggcactagtactgatgtcgtatacagggcttttgacatctacaatgataaagtagctggttttgctaaattcctaaaaactaattgttgtcgcttccaagaaaaggacgaagatgacaatttaattgattcttactttgtagttaagagacacactttctctaactaccaacatgaagaaacaatttataatttacttaaggattgtccagctgttgctaaacatgacttctttaagtttagaatagacggtgacatggtaccacatatatcacgtcaacgtcttactaaatacacaatggcagacctcgtctatgctttaaggcattttgatgaaggtaattgtgacacattaaaagaaatacttgtcacatacaattgttgtgatgatgattatttcaataaaaaggactggtatgattttgtagaaaacccagatatattacgcgtatacgccaacttaggtgaacgtgtacgccaagctttgttaaaaacagtacaattctgtgatgccatgcgaaatgctggtattgttggtgtactgacattagataatcaagatctcaatggtaactggtatgatttcggtgatttcatacaaaccacgccaggtagtggagttcctgttgtagattcttattattcattgttaatgcctatattaaccttgaccagggctttaactgcagagtcacatgttgacactgacttaacaaagccttacattaagtgggatttgttaaaatatgacttcacggaagagaggttaaaactctttgaccgttattttaaatattgggatcagacataccacccaaattgtgttaactgtttggatgacagatgcattctgcattgtgcaaactttaatgttttattctctacagtgttcccacttacaagttttggaccactagtgagaaaaatatttgttgatggtgttccatttgtagtttcaactggataccacttcagagagctaggtgttgtacataatcaggatgtaaatttacatagctctagacttagttttaaggaattacttgtgtatgctgctgaccctgctatgcacgctgcttctggtaatctattactagataaacgcactacgtgcttttcagtagctgcacttactaacaatgttgcttttcaaactgtcaaacccggtaattttaacaaagacttctatgactttgctgtgtctaagggtttctttaaggaaggaagttctgttgaattaaaacacttcttctttgctcaggatggtaatgctgctatcagcgattatgactactatcgttataatctaccaacaatgtgtgatatcagacaactactatttgtagttgaagttgttgataagtactttgattgttacgatggtggctgtattaatgctaaccaagtcatcgtcaacaacctagacaaatcagctggttttccatttaataaatggggtaaggctagactttattatgattcaatgagttatgaggatcaagatgcacttttcgcatatacaaaacgtaatgtcatccctactataactcaaatgaatcttaagtatgccattagtgcaaagaatagagctcgcaccgtagctggtgtctctatctgtagtactatgaccaatagacagtttcatcaaaaattattgaaatcaatagccgccactagaggagctactgtagtaattggaacaagcaaattctatggtggttggcacaacatgttaaaaactgtttatagtgatgtagaaaaccctcaccttatgggttgggattatcctaaatgtgatagagccatgcctaayatgcttagaattatggcctcacttgttcttgctcgcaaacatacaacgtgttgtagcttgtcacaccgtttctatagattagctaatgagtgtgctcaagtattgagtgaaatggtcatgtgtggcggttcactatatgttaaaccaggtggaacctcatcaggagatgccacaactgcttatgctaatagtgtttttaacatttgtcaagctgtcacggccaatgttaatgcacttttatctactgatggtaacaaaattgccgataagtatgtccgcaatttacaacacagactttatgagtgtctctatagaaatagagatgttgacacagactttgtgaatgagttttacgcatatttgcgtaaacatttctcaatgatgatactctctgacgatgctgttgtgtgtttcaatagcacttatgcatctcaaggtctagtggctagcataaagaactttaagtcagttctttattatcaaaacaatgtttttatgtctgaagcaaaatgttggactgagactgaccttactaaaggacctcatgaattttgctctcaacatacaatgctagttaaacagggtgatgattatgtgtaccttccttacccagatccatcaagaatcctaggggccggctgttttgtagatgatatcgtaaaaacagatggtacacttatgattgaacggttcgtgtctttagctatagatgcttacccacttactaaacatcctaatcaggagtatgctgatgtctttcatttgtacttacaatacataagaaagctacatgatgagttaacaggacacatgttagacatgtattctgttatgcttactaatgataacacttcaaggtattgggaacctgagttttatgaggctatgtacacaccgcatacagtcttacaggctgttggggcttgtgttctttgcaattcacagacttcattaagatgtggtgcttgcatacgtagaccattcttatgttgtaaatgctgttacgaccatgtcatatcaacatcacataaattagtcttgtctgttaatccgtatgtttgcaatgctccaggttgtgatgtcacagatgtgactcaactttacttaggaggtatgagctattattgtaaatcacataaaccacccattagttttccattgtgtgctaatggacaagtttttggtttatataaaaatacatgtgttggtagcgataatgttactgactttaatgcaattgcaacatgtgactggacaaatgctggtgattacattttagctaacacctgtactgaaagactcaagctttttgcagcagaaacgctcaaagctactgaggagacatttaaactgtcttatggtattgctactgtacgtgaagtgctgtctgacagagaattacatctttcatgggaagttggtaaacctagaccaccacttaaccgaaattatgtctttactggttatcgtgtaactaaaaacagtaaagtacaaataggagagtacacctttgaaaaaggtgactatggtgatgctgttgtttaccgaggtacaacaacttacaaattaaatgttggtgattattttgtgctgacatcacatacagtaatgccattaagtgcacctacactagtgccacaagagcactatgttagaattactggcttatacccaacactcaatatctcagatgagttttctagcaatgttgcaaattatcaaaaggttggtatgcaaaagtattctacactccagggaccacctggtactggtaagagtcattttgctattggcctagctctctactacccttctgctcgcatagtgtatacagcttgctctcatgccgctgttgatgcactatgtgagaaggcattaaaatatttgcctatagataaatgtagtagaattatacctgcacgtgctcgtgtagagtgttttgataaattcaaagtgaattcaacattagaacagtatgtcttttgtactgtaaatgcattgcctgagacgacagcagatatagttgtctttgatgaaatttcaatggccacaaattatgatttgagtgttgtcaatgccagattacgtgctaagcactatgtgtacattggcgaccctgctcaattacctgcaccacgcacattgctaactaagggcacactagaaccagaatatttcaattcagtgtgtagacttatgaaaactataggtccagacatgttcctcggaacttgtcggcgttgtcctgctgaaattgttgacactgtgagtgctttggtttatgataataagcttaaagcacataaagacaaatcagctcaatgctttaaaatgttttataagggtgttatcacgcatgatgtttcatctgcaattaacaggccacaaataggcgtggtaagagaattccttacacgtaaccctgcttggagaaaagctgtctttatttcaccttataattcacagaatgctgtagcctcaaagattttgggactaccaactcaaactgttgattcatcacagggctcagaatatgactatgtcatattcactcaaaccactgaaacagctcactcttgtaatgtaaacagatttaatgttgctattaccagagcaaaagtaggcatactttgcataatgtctgatagagacctttatgacaagttgcaatttacaagtcttgaaattccacgtaggaatgtggcaactttacaagctgaaaatgtaacaggactctttaaagattgtagtaaggtaatcactgggttacatcctacacaggcacctacacacctcagtgttgacactaaattcaaaactgaaggtttatgtgttgacatacctggcatacctaaggacatgacctatagaagactcatctctatgatgggttttaaaatgaattatcaagttaatggttaccctaacatgtttatcacccgcgaagaagctataagacatgtacgtgcatggattggcttcgatgtcgaggggtgtcatgctactagagaagctgttggtaccaatttacctttacagctaggtttttctacaggtgttaacctagttgctgtacctacaggttatgttgatacacctaataatacagatttttccagagttagtgctaaaccaccgcctggagatcaatttaaacacctcataccacttatgtacaaaggacttccttggaatgtagtgcgtataaagattgtacaaatgttaagtgacacacttaaaaatctctctgacagagtcgtatttgtcttatgggcacatggctttgagttgacatctatgaagtattttgtgaaaataggacctgagcgcacctgttgtctatgtgatagacgtgccacatgcttttccactgcttcagacacttatgcctgttggcatcattctattggatttgattacgtctataatccgtttatgattgatgttcaacaatggggttttacaggtaacctacaaagcaaccatgatctgtattgtcaagtccatggtaatgcacatgtagctagttgtgatgcaatcatgactaggtgtctagctgtccacgagtgctttgttaagcgtgttgactggactattgaatatcctataattggtgatgaactgaagattaatgcggcttgtagaaaggttcaacacatggttgttaaagctgcattattagcagacaaattcccagttcttcacgacattggtaaccctaaagctattaagtgtgtacctcaagctgatgtagaatggaagttctatgatgcacagccttgtagtgacaaagcttataaaatagaagaattattctattcttatgccacacattctgacaaattcacagatggtgtatgcctattttggaattgcaatgtcgatagatatcctgctaattccattgtttgtagatttgacactagagtgctatctaaccttaacttgcctggttgtgatggtggcagtttgtatgtaaataaacatgcattccacacaccagcttttgataaaagtgcttttgttaatttaaaacaattaccatttttctattactctgacagtccatgtgagtctcatggaaaacaagtagtgtcagatatagattatgtaccactaaagtctgctacgtgtataacacgttgcaatttaggtggtgctgtctgtagacatcatgctaatgagtacagattgtatctcgatgcttataacatgatgatctcagctggctttagcttgtgggtttacaaacaatttgatacttataacctctggaacacttttacaagacttcagagtttagaaaatgtggcttttaatgttgtaaataagggacactttgatggacaacagggtgaagtaccagtttctatcattaataacactgtttacacaaaagttgatggtgttgatgtagaattgtttgaaaataaaacaacattacctgttaatgtagcatttgagctttgggctaagcgcaacattaaaccagtaccagaggtgaaaatactcaataatttgggtgtggacattgctgctaatactgtgatctgggactacaaaagagatgctccagcacatatatctactattggtgtttgttctatgactgacatagccaagaaaccaactgaaacgatttgtgcaccactcactgtcttttttgatggtagagttgatggtcaagtagacttatttagaaatgcccgtaatggtgttcttattacagaaggtagtgttaaaggtttacaaccatctgtaggtcccaaacaagctagtcttaatggagtcacattaattggagaagccgtaaaaacacagttcaattattataagaaagttgatggtgttgtccaacaattacctgaaacttactttactcagagtagaaatttacaagaatttaaacccaggagtcaaatggaaattgatttcttagaattagctatggatgaattcattgaacggtataaattagaaggctatgccttcgaacatatcgtttatggagattttagtcatagtcagttaggtggtttacatctactgattggactagctaaacgttttaaggaatcaccttttgaattagaagattttattcctatggacagtacagttaaaaactatttcataacagatgcgcaaacaggttcatctaagtgtgtgtgttctgttattgatttattacttgatgattttgttgaaataataaaatcccaagatttatctgtagtttctaaggttgtcaaagtgactattgactatacagaaatttcatttatgctttggtgtaaagatggccatgtagaaacattttacccaaaattacaatctagtcaagcgtggcaaccgggtgttgctatgcctaatctttacaaaatgcaaagaatgctattagaaaagtgtgaccttcaaaattatggtgatagtgcaacattacctaaaggcataatgatgaatgtcgcaaaatatactcaactgtgtcaatatttaaacacattaacattagctgtaccctataatatgagagttatacattttggtgctggttctgataaaggagttgcaccaggtacagctgttttaagacagtggttgcctacgggtacgctgcttgtcgactcagatcttaatgactttgtctctgatgcagattcaactttgattggtgattgtgcaactgtacatacagctaataaatgggatctcattattagtgatatgtacgaccctaagactaaaaatgttacaaaagaaaatgactctaaagagggttttttcacttacatttgtgggtttatacaacaaaagctagctcttggaggttccgtggctataaagataacagaacattcttggaatgctgatctttataagctcatgggacacttcgcatggtggacagcctttgttactaatgtgaatgcgtcatcatctgaagcatttttaattggatgtaattatcttggcaaaccacgcgaacaaatagatggttatgtcatgcatgcaaattacatattttggaggaatacaaatccaattcagttgtcttcctattctttatttgacatgagtaaatttccccttaaattaaggggtactgctgttatgtctttaaaagaaggtcaaatcaatgatatgattttatctcttcttagtaaaggtagacttataattagagaaaacaacagagttgttatttctagtgatgttcttgttaacaactaaacgaacaatgtttgtttttcttgttttattgccactagtctctagtcagtgtgttaatcttacaamcagaactcaattacccyctgcatacactaattctttcacacgtggtgtttattaccctgacaaagttttcagatcctcagttttacattcaactcaggacttgttcttacctttcttttccaatgttacttggttccatgctatacatgtctctgggaccaatggtactaagaggtttgataaccctgtcctaccatttaatgatggtgtttattttgcttccactgagaagtctaacataataagaggctggatttttggtactactttagattcgaagacccagtccctacttattgttaataacgctactaatgttgttattaaagtctgtgaatttcaattttgtaatgatccatttttgggtgtttattaccacaaaaacaacaaaagttggatggaaagtgagttcagagtttattctagtgcgaataattgcacttttgaatatgtctctcagccttttcttatggaccttgaaggaaaacagggtaatttcaaaaatcttagggaatttgtgtttaagaatattgatggttattttaaaatatattctaagcacacgcctattaatttagtgcgtgatctccctcagggtttttcggctttagaaccattggtagatttgccaataggtattaacatcactaggtttcaaactttacttgctttacatagaagttatttgactcctggtgattcttcttcaggttggacagctggtgctgcagcttattatgtgggttatcttcaacctaggacttttctattaaaatataatgaaaatggaaccattacagatgctgtagactgtgcacttgaccctctctcagaaacaaagtgtacgttgaaatccttcactgtagaaaaaggaatctatcaaacttctaactttagagtccaaccaacagaatctattgttagatttcctaatattacaaacttgtgcccttttggtgaagtttttaacgccaccagatttgcatctgtttatgcttggaacaggaagagaatcagcaactgtgttgctgattattctgtcctatataattccgcatcattttccacttttaagtgttatggagtgtctcctactaaattaaatgatctctgctttactaatgtctatgcagattcatttgtaattagaggtgatgaagtcagacaaatcgctccagggcaaactggaaagattgctgattataattataaattaccagatgattttacaggctgcgttatagcttggaattctaacaatcttgattctaaggttggtggtaattataattacctgtatagattgtttaggaagtctaatctcaaaccttttgagagagatatttcaactgaaatctatcaggccggtagcacaccttgtaatggtgttgaaggttttaattgttactttcctttacaatcatatggtttccaacccactaatggtgttggttaccaaccatacagagtagtagtactttcttttgaacttctacatgcaccagcaactgtttgtggacctaaaaagtctactaatttggttaaaaacaaatgtgtcaatttcaacttcaatggtttaacaggcacaggtgttcttactgagtctaacaaaaagtttctgcctttccaacaatttggcagagacattgctgacactactgatgctgtccgtgatccacagacacttgagattcttgacattacaccatgttcttttggtggtgtcagtgttataacaccaggaacaaatacttctaaccaggttgctgttctttatcagggtgttaactgcacagaagtccctgttgctattcatgcagatcaacttactcctacttggcgtgtttattctacaggttctaatgtttttcaaacacgtgcaggctgtttaataggggctgaacatgtcaacaactcatatgagtgtgacatacccattggtgcaggtatatgcgctagttatcagactcagactaattctcctcggcgggcacgtagtgtagctagtcaatccatcattgcctacactatgtcacttggtgcagaaaattcagttgcttactctaataactctattgccatacccacaaattttactattagtgttaccacagaaattctaccagtgtctatgaccaagacatcagtagattgtacaatgtacatttgtggtgattcaactgaatgcagcaatcttttgttgcaatatggcagtttttgtacacaattaaaccgtgctttaactggaatagctgttgaacaagacaaaaacacccaagaagtttttgcacaagtcaaacaaatttacaaaacaccaccaattaaagattttggtggttttaatttttcacaaatattaccagatccatcaaaaccaagcaagaggtcatttattgaagatctacttttcaacaaagtgacacttgcagatgctggcttcatcaaacaatatggtgattgccttggtgatattgctgctagagacctcatttgtgcacaaaagtttaacggccttactgttttgccacctttgctcacagatgaaatgattgctcaatacacttctgcactgttagcgggtacaatcacttctggttggacctttggtgcaggtgctgcattacaaataccatttgctatgcaaatggcttataggtttaatggtattggagttacacagaatgttctctatgagaaccaaaaattgattgccaaccaatttaatagtgctattggcaaaattcaagactcactttcttccacagcaagtgcacttggaaaacttcaagatgtggtcaaccaaaatgcacaagctttaaacacgcttgttaaacaacttagctccaattttggtgcaatttcaagtgttttaaatgatatcctttcacgtcttgacaaagttgaggctgaagtgcaaattgataggttgatcacaggcagacttcaaagtttgcagacatatgtgactcaacaattaattagagctgcagaaatcagagcttctgctaatcttgctgctactaaaatgtcagagtgtgtacttggacaatcaaaaagagttgatttttgtggaaagggctatcatcttatgtccttccctcagtcagcacctcatggtgtagtcttcttgcatgtgacttatgtccctgcacaagaaaagaacttcacaactgctcctgccatttgtcatgatggaaaagcacactttcctcgtgaaggtgtctttgtttcaaatggcacacactggtttgtaacacaaaggaatttttatgaaccacaaatcattactacagacaacacatttgtgtctggtaactgtgatgttgtaataggaattgtcaacaacacagtttatgatcctttgcaacctgaattagactcattcaaggaggagttagataaatattttaagaatcatacatcaccagatgttgatttaggtgacatctctggcattaatgcttcagttgtaaacattcaaaaagaaattgaccgcctcaatgaggttgccaagaatttaaatgaatctctcatcgatctccaagaacttggaaagtatgagcagtatataaaatggccatggtacatttggctaggttttatagctggcttgattgccatagtaatggtgacaattatgctttgctgtatgaccagttgctgtagttgtctcaagggctgttgttcttgtggatcctgctgcaaatttgatgaagacgactctgagccagtgctcaaaggagtcaaattacattacacataaacgaacttatggatttgtttatgagaatcttcacaattggaactgtaactttgaagcaaggtgaaatcaaggatgctactccttcagattttgttcgcgctactgcaacgataccgatacaagcctcactccctttcggatggcttattgttggcgttgcacttcttgctgtttttcagagcgcttccaaaatcataaccctcaaaaagagatggcaactagcactctccaagggtgttcactttgtttgcaacttgctgttgttgtttgtaacagtttactcacaccttttgctcgttgctgctggccttgaagccccttttctctatctttatgctttagtctacttcttgcagagtataaactttgtaagaataataatgmggctttggctttgctggaaatgccgttccaaaaacccattactttatgatgccaactattttctttgctggcatactaattgttacgactattgtataccttacaatagtgtaacttcttcaattgtcattacttcaggtgatggcacaacaagtcctatttctgaacatgactaccagattggtggttatactgaaaaatgggaatctggagtaaaagactgtgttgtattacacagttacttcacttcagactattaccagctgtactcaactcaattgagtacagacactggtgttgaacatgttaccttcttcatctacaataaaattgttgatgagcctgaagaacatgtccaaattcacacaatcgacggttcatccggagttgttaatccagtaatggaaccaatttatgatgaaccgacgacgactactagcgtgcctttgtaagcacaagctgatgagtacgaacttatgtactcattcgtttcggaagagacaggtacgttaatagttaatagcgtacttctttttcttgctttcgtggtattcttgctagttacactagccatccttactgcgcttcgattgtgtgcgtactgctgcaatattgttaacgtgagtcttgtaaaaccttctttttacgtttactctcgtgttaaaaatctgaattcttctagagttcctgatcttccggtctaaacgaactaaatattatattagtttttctgtttggaactttaattttagccatggcagattccaacggtactattaccgttgaagagcttaaaaagctccttgaacaatggaacctagtaataggtttcctattccttacatggatttgtcttctacaatttgcctatgccaacaggaataggtttttgtatataattaagttaattttcctctggctgttatggccagtaactttagcttgttttgtgcttgctgctgtttacagaataaattggatcaccggtggaattgctatcgcaatggcttgtcttgtaggcttgatgtggctcagctacttcattgcttctttcagactgtttgcgcgtacgcgttccatgtggtcattcaatccagaaactaacattcttctcaacgtgccactccatggcactattctgaccagaccgcttctagaaagtgaactcgtaatcggagctgtgatccttcgtggacatcttcgtattgctggacaccatctaggacgctgtgacatcaaggacctgcctaaagaaatcactgttgctacatcacgaacgctttcttattacaaattgggagcttcgcagcgtgtagcaggtgactcaggttttgctgcatacagtcgctacaggattggcaactataaattaaacacagaccattccagtagcagtgacaatattgctttgcttgtacagtaagtgacaacagatgtttcatctcgttgactttcaggttactatagcagagatattactaattattatgaggacttttaaagtttccatttggaatcttgattacatcataaacctcataattaaaaatttatctaagtcactaactgagaataaatattctcaattagatgaagagcaaccaatggagattgattaaacgaacatgaaaattattcttttcttggcactgataacactcgctacttgtgagctttatcactaccaagagtgtgttagaggtacaacagtacttttaaaagaaccttgctcttctggaacatacgagggcaattcaccatttcatcctctagctgataacaaatttgcactgacttgctttagcactcaatttgcttttgcttgtcctgacggcgtaaaacacgtctatcagttacgtgccagatcagtttcacctaaactgttcatcagacaagaggaagttcaagaactttactctccaatttttcttattgttgcggcaatagtgtttataacactttgcttcacactcaaaagaaagacagaatgattgaactttcattaattgacttctatttgtgctttttagcctttctgctattccttgttttaattatgcttattatcttttggttctcacttgaactgcaagatcataatgaaacttgtcacgcctaaacgaacatgaaatttcttgttttcttaggaatcatcacaactgtagctgcatttcaccaagaatgtagtttacagtcatgtactcaacatcaaccatatgtagttgatgacccgtgtcctattcacttctattctaaatggtatattagagtaggagctagaaaatcagcacctttaattgaattgtgcgtggatgaggctggttctaaatcacccattcagtacatcgatatcggtaattatacagtttcctgtttaccttttacaattaattgccaggaacctaaattgggtagtcttgtagtgcgttgttcgttctatgaagactttttagagtatcatgacgttcgtgttgttttagatttcatctaaacgaacaaactaaaatgtctgataatggaccccaaaatcagcgaaatgcaccccgcattacgtttggtggaccctcagattcaactggcagtaaccagaatggagaacgcagtggggcgcgatcaaaacaacgtcggccccaaggtttacccaataatactgcgtcttggttcaccgctctcactcaacatggcaaggaagaccttaaattccctcgaggacaaggcgttccaattaacaccaatagcagtccagatgaccaaattggctactaccgaagmgctaccagacgaattcgtggtggtgacggtaaaatgaaagatctcagtccaagatggtatttctactacctaggaactgggccagaagctggacttccctatggtgctaacaaagacggcatcatatgggttgcaactgagggagccttgaatacaccaaaagatcacattggcacccgcaatcctgctaacaatgctgcaatcgtgctacaacttcctcaaggaacaacattgccaaaaggcttctacgcagaagggagcagaggcggcagtcaagcctcttctcgttcctcatcacgtagtcgcaacagttcaagaaattcaactccaggcagcagtaggggaacttctcctgctagaatggctggcaatggcggtgatgctgctcttgctttgctgctgcttgacagattgaaccagcttgagmgcaaaatgtctggtaaaggccaacaacaacaaggccaaactgtcactaagaaatctgctgctgaggcttctaagaagcctcggcaaaaacgtactgccactaaagcatacaatgtaacacaagctttcggcagacgtggtccagaacaaacccaaggaaattttggggaccaggaactaatcagacaaggaactgattacaaacattggccgcaaattgcacaatttgcccccagcgcttcagcgttcttcggaatgtcgcgcattggcatggaagtcacaccttcgggaacgtggttgacctacacaggtgccatcaaattggatgacaaagatccaaatttcaaagatcaagtcattttgctgaataagcatattgacgcatacaaaacattcccaccaacagagcctaaaaaggacaaaaagaagaaggctgatgaaactcaagccttaccgcagagacagaagaaacagcaaactgtgactcttcttcctgctgcagatttggatgatttctccaaacaattgcaacaatccatgagcagtgctgactcaactcaggcctaaactcatgcagaccacacaaggcagatgggctatataaacgttttcgcttttccgtttacgatatatagtctactcttgtgcagaatgaattctcgtaactacatagcacaagtagatgtagttaactttaatctcacatagcaatctttaatcagtgtgtaacattagggaggacttgaa

SEQ ID NO: 44 - DNA, 29704 bp, synthetic construct
  misc_feature 1..29704: note = Reconstituted virus 7
  source 1..29704: mol_type = other DNA
ttataccttcccaggtaacaaaccaaccaactttcgatctcttgtagatctgttctctaaacgaactttaaaatctgtgtggctgtcactcggctgcatgcttagtgcactcacgcagtataattaataactaattactgtcgttgacaggacacgagtaactcgtctatcttctgcaggctgcttacggtttcgtccgtgttgcagccgatcatcagcacatctaggttttgtccgggtgtgaccgaaaggtaagatggagagccttgtccctggtttcaacgagaaaacacacgtccaactcagtttgcctgttttacaggttcgcgacgtgctcgtacgtggctttggagactccgtggaggaggtcttatcagaggcacgtcaacatcttaaagatggcacttgtggcttagtagaagttgaaaaaggcgttttgcctcaacttgaacagccctatgtgttcatcaaacgttcggatgctcgaactgcacctcatggtcatgttatggttgagctggtagcagaactcgaaggcattcagtacggtcgtagtggtgagacacttggtgtccttgtccctcatgtgggcgaaataccagtggcttaccgcaaggttcttcttcgtaagaacggtaataaaggagctggtggccatagttacggcgccgatctaaagtcatttgacttaggcgacgagcttggcactgatccttatgaagattttcaagaaaactggaacactaaacatagcagtggtgttacccgtgaactcatgcgtgagcttaacggaggggcatacactcgctatgtcgataacaacttctgtggccctgatggctaccctcttgagtgcattaaagaccttctagcacgtgctggtaaagcttcatgcactttgtccgaacaactggactttattgacactaagaggggtgtatactgctgccgtgaacatgagcatgaaattgcttggtacacggaacgttctgaaaagagctatgaattgcagacaccttttgaaattaaattggcaaagaaatttgacaccttcaatggggaatgtccaaattttgtatttcccttaaattccataatcaagactattcaaccaagggttgaaaagaaaaagcttgatggctttatgggtagaattcgatctgtctatccagttgcgtcaccaaatgaatgcaaccaaatgtgcctttcaactctcatgaagtgtgatcattgtggtgaaacttcatggcagacgggcgattttgttaaagccacttgcgaattttgtggcactgagaatttgactaaagaaggtgccactacttgtggttacttaccccaaaatgctgttgttaaaatttattgtccagcatgtcacaattcagaagtaggacctgagcatagtcttgccgaataccataatgaatctggcttgaaaaccattcttcgtaagggtggtcgcactattgcctttggaggctgtgtgttctcttatgttggttgccataacaagtgtgcctattgggttccacgtgctagcgctaacataggttgtaaccatacaggtgttgttggagaaggttccgaaggtcttaatgacaaccttcttgaaatactccaaaaagagaaagtcaacatcaatattgttggtgactttaaacttaatgaagagatcgccattattttggcatctttttctgcttccacaagtgcttttgtggaaactgtgaaaggtttggattataaagcattcaaacaaattgttgaatcctgtggtaattttaaagttacaaaaggaaaagctaaaaaaggtgcctggaatattggtgaacagaaatcaatactgagtcctctttatgcatttgcatcagaggctgctcgtgttgtacgatcaattttctcccgcactcttgaaactgctcaaaattctgtgcgtgttttacagaaggccgctataacaatactagatggaatttcacagtattcactgagactcattgatgctatgatgttcacatctgatttggctactaacaatctagttgtaatggcctacattacaggtggtgttgttcagttgacttcgcagtggctaactaacatctttggcactgtttatgaaaaactcaaacccgtccttgattggcttgaagagaagtttaaggaaggtgtagagtttcttagagacggttgggaaattgttaaatttatctcaacctgtgcttgtgaaattgtcggtggacaaattgtcacctgtgcaaaggaaattaaggagagtgttcagacattctttaagcttgtaaataaatttttggctttgtgtgctgactctatcattattggtggagctaaacttaaagccttgaatttaggtgaaacatttgtcacgcactcaaagggattgtacagaaagtgtgttaaatccagagaagaaactggcctactcatgcctctaaaagccccaaaagaaattatcttcttagagggagaaacacttcccacagaagtgttaacagaggaagttgtcttgaaaactggtgatttacaaccattagaacaacctactagtgaagctgttgaagctccattggttggtacaccagtttgtattaacgggcttatgttgctcgaaatcaaagacacagaaaagtactgtgcccttgcacctaatatgatggtaacaaacaataccttcacactcaaaggcggtgcaccaacaaaggttacttttggtgatgacactgtgatagaagtgcaaggttacaagagtgtgaatatcacttttgaacttgatgaaaggattgataaagtacttaatgagaagtgctctgcctatacagttgaactcggtacagaagtaaatgagttcgcctgtgttgtggcagatgctgtcataaaaactttgcaaccagtatctgaattacttacaccactgggcattgatttagatgagtggagtatggctacatactacttatttgatgagtctggtgagtttaaattggcttcacatatgtattgttctttttaccctccagatgaggatgaagaagaaggtgattgtgaagaagaagagtttgagccatcaactcaatatgagtatggtactgaagatgattaccaaggtaaacctttggaatttggtgccacttctgctgctcttcaacctgaagaagagcaagaagaagattggttagatgatgatagtcaacaaactgttggtcaacaagacggcagtgaggacaatcagacaactactattcaaacaattgttgaggttcaacctcaattagagatggaacttacaccagttgttcagactattgaagtgaatagttttagtggttatttaaaacttactgacaatgtatacattaaaaatgcagacattgtggaagaagctaaaaaggtaaaaccaacagtggttgttaatgcagccaatgtttaccttaaacatggaggaggtgttgcaggagccttaaataaggctactaacaatgccatgcaagttgaatctgatgattacatagctactaatggaccacttaaagtgggtggtagttgtgttttaagcggacacaatcttgctaaacactgtcttcatgttgtcggcccaaatgttaacaaaggtgaagacattcaacttcttaagagtgcttatgaaaattttaatcagcacgaagttctacttgcaccattattatcagctggtatttttggtgctgaccctatacattctttaagagtttgtgtagatactgttcgcacaaatgtctacttagctgtctttgataaaaatctctatgacaaacttgtttcaagctttttggaaatgaagagtgaaaagcaagttgaacaaaagatcgctgagattcctaaagaggaagttaagccatttataactgaaagtaaaccttcagttgaacagagaaaacaagatgataagaaaatcaaagcttgtgttgaagaagttacaacaactctggaagaaactaagttcctcacagaaaacttgttactttatattgacattaatggcaatcttcatccagattctgccactcttgttagtgacattgacatcactttcttaaagaaagatgctccatatatagtgggtgatgttgttcaagagggtgttttaactgctgtggttatacctactaaaaaggctggtggcactactgaaatgctagcgaaagctttgagaaaagtgccaacagacaattatataaccacttacccgggtcagggtttaaatggttacactgtagaggaggcaaagacagtgcttaaaaagtgtaaaagtgccttttacattctaccatctattatctctaatgagaagcaagaaattcttggaactgtttcttggaatttgcgagaaatgcttgcacatgcagaagaaacacgcaaattaatgcctgtctgtgtggaaactaaagccatagtttcaactatacagcgtaaatataagggtattaaaatacaagagggtgtggttgattatggtgctagattttacttttacaccagtaaaacaactgtagcgtcacttatcaacacacttaacgatctaaatgaaactcttgttacaatgccacttggctatgtaacacatggcttaaatttggaagaagctgctcggtatatgagatctctcaaagtgccagctacagtttctgtttcttcacctgatgctgttacagcgtataatggttatcttacttcttcttctaaaacacctgaagaacattttattgaaaccatctcacttgctggttcctataaagattggtcctattctggacaatctacacaactaggtatagaatttcttaagagaggtgataaaagtgtatattacactagtaatcctaccacattccacctagatggtgaagttatcacctttgacaatcttaagacacttctttctttgagagaagtgaggactattaaggtgtttacaacagtagacaacattaacctccacacgcaagttgtggacatgtcaatgacatatggacaacagtttggtccaacttatttggatggagctgatgttactaaaataaaacctcataattcacatgaaggtaaaacattttatgttttacctaatgatgacactctacgtgttgaggcttttgagtactaccacacaactgatcctagttttctgggtaggtacatgtcagcattaaatcacactaaaaagtggaaatacccacaagttaatggtttaacttctattaaatgggcagataacaactgttatcttgccactgcattgttaacactccaacaaatagagttgaagtttaatccacctgctctacaagatgcttattacagagcaagggctggtgaagctgctaacttttgtgcacttatcttagcctactgtaataagacagtaggtgagttaggtgatgttagagaaacaatgagttacttgtttcaacatgccaatttagattcttgcaaaagagtcttgaacgtggtgtgtaaaacttgtggacaacagcagacaacccttaagggtgtagaagctgttatgtacatgggcacactttcttatgaacaatttaagaaaggtgttcagataccttgtacgtgtggtaaacaagctacaaaatatctagtacaacaggagtcaccttttgttatgatgtcagcaccacctgctcagtatgaacttaagcatggtacatttacttgtgctagtgagtacactggtaattaccagtgtggtcactataaacatataacttctaaagaaactttgtattgcatagacggtgctttacttacaaagtcctcagaatacaaaggtcctattacggatgttttctacaaagaaaacagttacacaacaaccataaaaccagttacttataaattggatggtgttgtttgtacagaaattgaccctaagttggacaattattataagaaagacaattcttatttcacagagcaaccaattgatcttgtaccaaaccaaccatatccaaacgcaagcttcgataattttaagtttgtatgtgataatatcaaatttgctgatgatttaaaccagttaactggttataagaaacctgcttcaagagagcttaaagttacatttttccctgacttaaatggtgatgtggtggctattgattataaacactacacaccctcttttaagaaaggagctaaattgttacataaacctattgtttggcatgttaacaatgcaactaataaagccacgtataaaccaaatacctggtgtatacgttgtctttggagcacaaaaccagttgaaacatcaaattcgtttgatgtactgaagtcagaggacgcgcagggaatggataatcttgcctgcgaagatctaaaaccagtctctgaagaagtagtggaaaatcctaccatacagaaagacgttcttgagtgtaatgtgaaaactaccgaagttgtaggagacattatacttaaaccagcaaataatagtttaaaaattacagaagaggttggccacacagatctaatggctgcttatgtagacaattctagtcttactattaagaaacctaatgaattatctagagtattaggtttgaaaacccttgctactcatggtttagctgctgttaatagtgtcccttgggatactatagctaattatgctaagccttttcttaacaaagttgttagtacaactactaacatagttacacggtgtttaaaccgtgtttgtactaattatatgccttatttctttactttattgctacaattgtgtacttttactagaagtacaaattctagaattaaagcatctatgccgactactatagcaaagaatactgttaagagtgtcggtaaattttgtctagaggcttcatttaattatttgaagtcacctaatttttctaaactgataaatattataatttggtttttactattaagtgtttgcctaggttctttaatctactcaaccgctgctttaggtgttttaatgtctaatttaggcatgccttcttactgtactggttacagagaaggctatttgaactctactaatgtcactattgcaacctactgtactggttctataccttgtagtgtttgtcttagtggtttagattctttagacacctatccttctttagaaactatacaaattaccatttcatcttttaaatgggatttaactgcttttggcttagttgcagagtggtttttggcatatattcttttcactaggtttttctatgtacttggattggctgcaatcatgcaattgtttttcagctattttgcagtacattttattagtaattcttggcttatgtggttaataattaatcttgtacaaatggccccgatttcagctatggttagaatgtacatcttctttgcatcattttattatgtatggaaaagttatgtgcatgttgtagacggttgtaattcatcaacttgtatgatgtgttacaaacgtaatagagcaacaagagtcgaatgtacaactattgttaatggtgttagaaggtccttttatgtctatgctaatggaggtaaaggcttttgcaaactacacaattggaattgtgttaattgtgatacattctgtgctggtagtacatttattagtgatgaagttgcgagagacttgtcactacagtttaaaagaccaataaatcctactgaccagtcttcttacatcgttgatagtgttacagtgaagaatggttccatccatctttactttgataaagctggtcaaaagacttatgaaagacattctctctctcattttgttaacttagacaacctgagagctaataacactaaaggttcattgcctattaatgttatagtttttgatggtaaatcaaaatgtgaagaatcatctgcaaaatcagcgtctgtttactacagtcagcttatgtgtcaacctatactgttactagatcaggcattagtgtctgatgttggtgatagtgcggaagttgcagttaaaatgtttgatgcttacgttaatacgttttcatcaacttttaacgtaccaatggaaaaactcaaaacactagttgcaactgcagaagctgaacttgcaaagaatgtgtccttagacaatgtcttatctacttttatttcagcagctcggcaagggtttgttgattcagatgtagaaactaaagatgttgttgaatgtcttaaattgtcacatcaatctgacatagaagttactggcgatagttgtaataactatatgctcacctataacaaagttgaaaacatgacaccccgtgaccttggtgcttgtattgactgtagtgcgcgtcatattaatgcgcaggtagcaaaaagtcacaacattgctttgatatggaacgttaaagatttcatgtcattgtctgaacaactacgaaaacaaatacgtagtgctgctaaaaagaataacttaccttttaagttgacatgtgcaactactagacaagttgttaatgttgtaacaacaaagatagcacttaagggtggtaaaattgttaataattggttgaagcagttaattaaagttacacttgtgttcctttttgttgctgctattttctatttaataacacctgttcatgtcatgtctaaacatactgacttttcaagtgaaatcataggatacaaggctattgatggtggtgtcactcgtgacatagcatctacagatacttgttttgctaacaaacatgctgattttgacacatggtttagccagcgtggtggtagttatactaatgacaaagcttgcccattgattgctgcagtcataacaagagaagtgggttttgtcgtgcctggtttgcctggcacgatattacgcacaactaatggtgactttttgcatttcttacctagagtttttagtgcagttggtaacatctgttacacaccatcaaaacttatagagtacactgactttgcaacatcagcttgtgttttggctgctgaatgtacaatttttaaagatgcttctggtaagccagtaccatattgttatgataccaatgtactagaaggttctgttgcttatgaaagtttacgccctgacacacgttatgtgctcatggatggctctattattcaatttcctaacacctaccttgaaggttctgttagagtggtaacaacttttgattctgagtactgtaggcacggcacttgtgaaagatcagaagctggtgtttgtgtatctactagtggtagatgggtacttaacaatgattattacagatctttaccaggagttttctgtggtgtagatgctgtaaatttacttactaatatgtttacaccactaattcaacctattggtgctttggacatatcagcatctatagtagctggtggtattgtagctatcgtagtaacatgccttgcctactattttatgaggtttagaagagcttttggtgaatacagtcatgtagttgcctttaatactttactattccttatgtcattcactgtactctgtttaacaccagtttactcattcttacctggtgtttattctgttatttacttgtacttgacattttatcttactaatgatgtttcttttttagcacatattcagtggatggttatgttcacacctttagtacctttctggataacaattgcttatatcatttgtatttccacaaagcatttctattggttctttagtaattacctaaagagacgtgtagtctttaatggtgtttcctttagtacttttgaagaagctgcgctgtgcacctttttgttaaataaagaaatgtatctaaagttgcgtagtgatgtgctattacctcttacgcaatataatagatacttagctctttataataagtacaagtattttagtggagcaatggatacaactagctacagagaagctgcttgttgtcatctcgcaaaggctctcaatgacttcagtaactcaggttctgatgttctttaccaaccaccacaaacctctatcacctcagctgttttgcagagtggttttagaaaaatggcattcccatctggtaaagttgagggttgtatggtacaagtaacttgtggtacaactacacttaacggtctttggcttgatgacgtagtttactgtccaagacatgtgatctgcacctctgaagacatgcttaaccctaattatgaagatttactcattcgtaagtctaatcataatttcttggtacaggctggtaatgttcaactcagggttattggacattctatgcaaaattgtgtacttaagcttaaggttgatacagccaatcctaagacacctaagtataagtttgttcgcattcaaccaggacagactttttcagtgttagcttgttacaatggttcaccatctggtgtttaccaatgtgctatgaggcccaatttcactattaagggttcattccttaatggttcatgtggtagtgttggttttaacatagattatgactgtgtctctttttgttacatgcaccatatggaattaccaactggagttcatgctggcacagacttagaaggtaacttttatggaccttttgttgacaggcaaacagcacaagcagctggtacggacacaactattacagttaatgttttagcttggttgtacgctgctgttataaatggagacaggtggtttctcaatcgatttaccacaactcttaatgactttaaccttgtggctatgaagtacaattatgaacctctaacacaagaccatgttgacatactaggacctctttctgctcaaactggaattgccgttttagatatgtgtgcttcattaaaagaattactgcaaaatggtatgaatggacgtaccatattgggtagtgctttattagaagatgaatttacaccttttgatgttgttagacaatgctcaggtgttactttccaaagtgcagtgaaaagaacaatcaagggtacacaccactggttgttactcacaattttgacttcacttttagttttagtccagagtactcaatggtctttgttcttttttttgtatgaaaatgcctttttaccttttgctatgggtattattgctatgtctgcttttgcaatgatgtttgtcaaacataagcatgcatttctctgtttgtttttgttaccttctcttgccactgtagcttattttaatatggtctatatgcctgctagttgggtgatgcgtattatgacatggttggatatggttgatactagtttgtctggttttaagctaaaagactgtgttatgtatgcatcagctgtagtgttactaatccttatgacagcaagaactgtgtatgatgatggtgctaggagagtgtggacacttatgaatgtcttgacactcgtttataaagtttattatggtaatgctttagatcaagccatttccatgtgggctcttataatctctgttacttctaactactcaggtgtagttacaactgtcatgtttttggccagaggtattgtttttatgtgtgttgagtattgccctattttcttcataactggtaatacacttcagtgtataatgctagtttattgtttcttaggctatttttgtacttgttactttggcctcttttgtttactcaaccgctactttagactgactcttggtgtttatgattacttagtttctacacaggagtttagatatatgaattcacagggactactcccacccaagaatagcatagatgccttcaaactcaacattaaattgttgggtgttggtggcaaaccttgtatcaaagtagccactgtacagtctaaaatgtcagatgtaaagtgcacatcagtagtcttactctcagttttgcaacaactcagagtagaatcatcatctaaattgtgggctcaatgtgtccagttacacaatgacattctcttagctaaagatactactgaagcctttgaaaaaatggtttcactactttctgttttgctttccatgcagggtgctgtagacataaacaagctttgtgaagaaatgctggacaacagggcaaccttacaagctatagcctcagagtttagttcccttccatcatatgcagcttttgctactgctcaagaagcttatgagcaggctgttgctaatggtgattctgaagttgttcttaaaaagttgaagaagtctttgaatgtggctaaatctgaatttgaccgtgatgcagccatgcaacgtaagttggaaaagatggctgatcaagctatgacccaaatgtataaacaggctagatctgaggacaagagggcaaaagttactagtgctatgcagacaatgcttttcactatgcttagaaagttggataatgatgcactcaacaacattatcaacaatgcaagagatggttgtgttcccttgaacataatacctcttacaacagcagccaaactaatggttgtcataccagactataacacatataaaaatacgtgtgatggtacaacatttacttatgcatcagcattgtgggaaatccaacaggttgtagatgcagatagtaaaattgttcaacttagtgaaattagtatggacaattcacctaatttagcatggcctcttattgtaacagctttaagggccaattctgctgtcaaattacagaataatgagcttagtcctgttgcactacgacagatgtcttgtgctgccggtactacacaaactgcttgcactgatgacaatgcgttagcttactacaacacaacaaagggaggtaggtttgtacttgcactgttatccgatttacaggatttgaaatgggctagattccctaagagtgatggaactggtactatctatacagaactggaaccaccttgtaggtttgttacagacacacctaaaggtcctaaagtgaagtatttatactttattaaaggattaaacaacctaaatagaggtatggtacttggtagtttagctgccacagtacgtctacaagctggtaatgcaacagaagtgcctgccaattcaactgtattatctttctgtgcttttgctgtagatgctgctaaagcttacaaagattatctagctagtgggggacaaccaatcactaattgtgttaagatgttgtgtacacacactggtactggtcaggcaataacagttacaccggaagccaatatggatcaagaatcctttggtggtgcatcgtgttgtctgtactgccgttgccacatagatcatccaaatcctaaaggattttgtgacttaaaaggtaagtatgtacaaatacctacaacttgtgctaatgaccctgtgggttttacacttaaaaacacagtctgtaccgtctgcggtatgtggaaaggttatggctgtagttgtgatcaactccgcgaacccatgcttcagtcagctgatgcacaatcgtttttaaacgggtttgcggtgtaagtgcagcccgtcttacaccgtgcggcacaggcactagtactgatgtcgtatacagggcttttgacatctacaatgataaagtagctggttttgctaaattcctaaaaactaattgttgtcgcttccaagaaaaggacgaagatgacaatttaattgattcttactttgtagttaagagacacactttctctaactaccaacatgaagaaacaatttataatttacttaaggattgtccagctgttgctaaacatgacttctttaagtttagaatagacggtgacatggtaccacatatatcacgtcaacgtcttactaaatacacaatggcagacctcgtctatgctttaaggcattttgatgaaggtaattgtgacacattaaaagaaatacttgtcacatacaattgttgtgatgatgattatttcaataaaaaggactggtatgattttgtagaaaacccagatatattacgcgtatacgccaacttaggtgaacgtgtacgccaagctttgttaaaaacagtacaattctgtgatgccatgcgaaatgctggtattgttggtgtactgacattagataatcaagatctcaatggtaactggtatgatttcggtgatttcatacaaaccacgccaggtagtggagttcctgttgtagattcttattattcattgttaatgcctatattaaccttgaccagggctttaactgcagagtcacatgttgacactgacttaacaaagccttacattaagtgggatttgttaaaatatgacttcacggaagagaggttaaaactctttgaccgttattttaaatattgggatcagacataccacccaaattgtgttaactgtttggatgacagatgcattctgcattgtgcaaactttaatgttttattctctacagtgttcccacttacaagttttggaccactagtgagaaaaatatttgttgatggtgttccatttgtagtttcaactggataccacttcagagagctaggtgttgtacataatcaggatgtaaatttacatagctctagacttagttttaaggaattacttgtgtatgctgctgaccctgctatgcacgctgcttctggtaatctattactagataaacgcactacgtgcttttcagtagctgcacttactaacaatgttgcttttcaaactgtcaaacccggtaattttaacaaagacttctatgactttgctgtgtctaagggtttctttaaggaaggaagttctgttgaattaaaacacttcttctttgctcaggatggtaatgctgctatcagcgattatgactactatcgttataatctaccaacaatgtgtgatatcagacaactactatttgtagttgaagttgttgataagtactttgattgttacgatggtggctgtattaatgctaaccaagtcatcgtcaacaacctagacaaatcagctggttttccatttaataaatggggtaaggctagactttattatgattcaatgagttatgaggatcaagatgcacttttcgcatatacaaaacgtaatgtcatccctactataactcaaatgaatcttaagtatgccattagtgcaaagaatagagctcgcaccgtagctggtgtctctatctgtagtactatgaccaatagacagtttcatcaaaaattattgaaatcaatagccgccactagaggagctactgtagtaattggaacaagcaaattctatggtggttggcacaacatgttaaaaactgtttatagtgatgtagaaaaccctcaccttatgggttgggattatcctaaatgtgatagagccatgcctaayatgcttagaattatggcctcacttgttcttgctcgcaaacatacaacgtgttgtagcttgtcacaccgtttctatagattagctaatgagtgtgctcaagtattgagtgaaatggtcatgtgtggcggttcactatatgttaaaccaggtggaacctcatcaggagatgccacaactgcttatgctaatagtgtttttaacatttgtcaagctgtcacggccaatgttaatgcacttttatctactgatggtaacaaaattgccgataagtatgtccgcaatttacaacacagactttatgagtgtctctatagaaatagagatgttgacacagactttgtgaatgagttttacgcatatttgcgtaaacatttctcaatgatgatactctctgacgatgctgttgtgtgtttcaatagcacttatgcatctcaaggtctagtggctagcataaagaactttaagtcagttctttattatcaaaacaatgtttttatgtctgaagcaaaatgttggactgagactgaccttactaaaggacctcatgaattttgctctcaacatacaatgctagttaaacagggtgatgattatgtgtaccttccttacccagatccatcaagaatcctaggggccggctgttttgtagatgatatcgtaaaaacagatggtacacttatgattgaacggttcgtgtctttagctatagatgcttacccacttactaaacatcctaatcaggagtatgctgatgtctttcatttgtacttacaatacataagaaagctacatgatgagttaacaggacacatgttagacatgtattctgttatgcttactaatgataacacttcaaggtattgggaacctgagttttatgaggctatgtacacaccgcatacagtcttacaggctgttggggcttgtgttctttgcaattcacagacttcattaagatgtggtgcttgcatacgtagaccattcttatgttgtaaatgctgttacgaccatgtcatatcaacatcacataaattagtcttgtctgttaatccgtatgtttgcaatgctccaggttgtgatgtcacagatgtgactcaactttacttaggaggtatgagctattattgtaaatcacataaaccacccattagttttccattgtgtgctaatggacaagtttttggtttatataaaaatacatgtgttggtagcgataatgttactgactttaatgcaattgcaacatgtgactggacaaatgctggtgattacattttagctaacacctgtactgaaagactcaagctttttgcagcagaaacgctcaaagctactgaggagacatttaaactgtcttatggtattgctactgtacgtgaagtgctgtctgacagagaattacatctttcatgggaagttggtaaacctagaccaccacttaaccgaaattatgtctttactggttatcgtgtaactaaaaacagtaaagtacaaataggagagtacacctttgaaaaaggtgactatggtgatgctgttgtttaccgaggtacaacaacttacaaattaaatgttggtgattattttgtgctgacatcacatacagtaatgccattaagtgcacctacactagtgccacaagagcactatgttagaattactggcttatacccaacactcaatatctcagatgagttttctagcaatgttgcaaattatcaaaaggttggtatgcaaaagtattctacactccagggaccacctggtactggtaagagtcattttgctattggcctagctctctactacccttctgctcgcatagtgtatacagcttgctctcatgccgctgttgatgcactatgtgagaaggcattaaaatatttgcctatagataaatgtagtagaattatacctgcacgtgctcgtgtagagtgttttgataaattcaaagtgaattcaacattagaacagtatgtcttttgtactgtaaatgcattgcctgagacgacagcagatatagttgtctttgatgaaatttcaatggccacaaattatgatttgagtgttgtcaatgccagattacgtgctaagcactatgtgtacattggcgaccctgctcaattacctgcaccacgcacattgctaactaagggcacactagaaccagaatatttcaattcagtgtgtagacttatgaaaactataggtccagacatgttcctcggaacttgtcggcgttgtcctgctgaaattgttgacactgtgagtgctttggtttatgataataagcttaaagcacataaagacaaatcagctcaatgctttaaaatgttttataagggtgttatcacgcatgatgtttcatctgcaattaacaggccacaaataggcgtggtaagagaattccttacacgtaaccctgcttggagaaaagctgtctttatttcaccttataattcacagaatgctgtagcctcaaagattttgggactaccaactcaaactgttgattcatcacagggctcagaatatgactatgtcatattcactcaaaccactgaaacagctcactcttgtaatgtaaacagatttaatgttgctattaccagagcaaaagtaggcatactttgcataatgtctgatagagacctttatgacaagttgcaatttacaagtcttgaaattccacgtaggaatgtggcaactttacaagctgaaaatgtaacaggactctttaaagattgtagtaaggtaatcactgggttacatcctacacaggcacctacacacctcagtgttgacactaaattcaaaactgaaggtttatgtgttgacatacctggcatacctaaggacatgacctatagaagactcatctctatgatgggttttaaaatgaattatcaagttaatggttaccctaacatgtttatcacccgcgaagaagctataagacatgtacgtgcatggattggcttcgatgtcgaggggtgtcatgctactagagaagctgttggtaccaatttacctttacagctaggtttttctacaggtgttaacctagttgctgtacctacaggttatgttgatacacctaataatacagatttttccagagttagtgctaaaccaccgcctggagatcaatttaaacacctcataccacttatgtacaaaggacttccttggaatgtagtgcgtataaagattgtacaaatgttaagtgacacacttaaaaatctctctgacagagtcgtatttgtcttatgggcacatggctttgagttgacatctatgaagtattttgtgaaaataggacctgagcgcacctgttgtctatgtgatagacgtgccacatgcttttccactgcttcagacacttatgcctgttggcatcattctattggatttgattacgtctataatccgtttatgattgatgttcaacaatggggttttacaggtaacctacaaagcaaccatgatctgtattgtcaagtccatggtaatgcacatgtagctagttgtgatgcaatcatgactaggtgtctagctgtccacgagtgctttgttaagcgtgttgactggactattgaatatcctataattggtgatgaactgaagattaatgcggcttgtagaaaggttcaacacatggttgttaaagctgcattattagcagacaaattcccagttcttcacgacattggtaaccctaaagctattaagtgtgtacctcaagctgatgtagaatggaagttctatgatgcacagccttgtagtgacaaagcttataaaatagaagaattattctattcttatgccacacattctgacaaattcacagatggtgtatgcctattttggaattgcaatgtcgatagatatcctgctaattccattgtttgtagatttgacactagagtgctatctaaccttaacttgcctggttgtgatggtggcagtttgtatgtaaataaacatgcattccacacaccagcttttgataaaagtgcttttgttaatttaaaacaattaccatttttctattactctgacagtccatgtgagtctcatggaaaacaagtagtgtcagatatagattatgtaccactaaagtctgctacgtgtataacacgttgcaatttaggtggtgctgtctgtagacatcatgctaatgagtacagattgtatctcgatgcttataacatgatgatctcagctggctttagcttgtgggtttacaaacaatttgatacttataacctctggaacacttttacaagacttcagagtttagaaaatgtggcttttaatgttgtaaataagggacactttgatggacaacagggtgaagtaccagtttctatcattaataacactgtttacacaaaagttgatggtgttgatgtagaattgtttgaaaataaaacaacattacctgttaatgtagcatttgagctttgggctaagcgcaacattaaaccagtaccagaggtgaaaatactcaataatttgggtgtggacattgctgctaatactgtgatctgggactacaaaagagatgctccagcacatatatctactattggtgtttgttctatgactgacatagccaagaaaccaactgaaacgatttgtgcaccactcactgtcttttttgatggtagagttgatggtcaagtagacttatttagaaatgcccgtaatggtgttcttattacagaaggtagtgttaaaggtttacaaccatctgtaggtcccaaacaagctagtcttaatggagtcacattaattggagaagccgtaaaaacacagttcaattattataagaaagttgatggtgttgtccaacaattacctgaaacttactttactcagagtagaaatttacaagaatttaaacccaggagtcaaatggaaattgatttcttagaattagctatggatgaattcattgaacggtataaattagaaggctatgccttcgaacatatcgtttatggagattttagtcatagtcagttaggtggtttacatctactgattggactagctaaacgttttaaggaatcaccttttgaattagaagattttattcctatggacagtacagttaaaaactatttcataacagatgcgcaaacaggttcatctaagtgtgtgtgttctgttattgatttattacttgatgattttgttgaaataataaaatcccaagatttatctgtagtttctaaggttgtcaaagtgactattgactatacagaaatttcatttatgctttggtgtaaagatggccatgtagaaacattttacccaaaattacaatctagtcaagcgtggcaaccgggtgttgctatgcctaatctttacaaaatgcaaagaatgctattagaaaagtgtgaccttcaaaattatggtgatagtgcaacattacctaaaggcataatgatgaatgtcgcaaaatatactcaactgtgtcaatatttaaacacattaacattagctgtaccctataatatgagagttatacattttggtgctggttctgataaaggagttgcaccaggtacagctgttttaagacagtggttgcctacgggtacgctgcttgtcgactcagatcttaatgactttgtctctgatgcagattcaactttgattggtgattgtgcaactgtacatacagctaataaatgggatctcattattagtgatatgtacgaccctaagactaaaaatgttacaaaagaaaatgactctaaagagggttttttcacttacatttgtgggtttatacaacaaaagctagctcttggaggttccgtggctataaagataacagaacattcttggaatgctgatctttataagctcatgggacacttcgcatggtggacagcctttgttactaatgtgaatgcgtcatcatctgaagcatttttaattggatgtaattatcttggcaaaccacgcgaacaaatagatggttatgtcatgcatgcaaattacatattttggaggaatacaaatccaattcagttgtcttcctattctttatttgacatgagtaaatttccccttaaattaaggggtactgctgttatgtctttaaaagaaggtcaaatcaatgatatgattttatctcttcttagtaaaggtagacttataattagagaaaacaacagagttgttatttctagtgatgttcttgttaacaactaaacgaacaatgtttgtttttcttgttttattgccactagtctctagtcagtgtgttaatcttacaamcagaactcaattacccyctgcatacactaattctttcacacgtggtgtttattaccctgacaaagttttcagatcctcagttttacattcaactcaggacttgttcttacctttcttttccaatgttacttggttccatgctatacatgtctctgggaccaatggtactaagaggtttgataaccctgtcctaccatttaatgatggtgtttattttgcttccactgagaagtctaacataataagaggctggatttttggtactactttagattcgaagacccagtccctacttattgttaataacgctactaatgttgttattaaagtctgtgaatttcaattttgtaatgatccatttttgggtgtttattaccacaaaaacaacaaaagttggatggaaagtgagttcagagtttattctagtgcgaataattgcacttttgaatatgtctctcagccttttcttatggaccttgaaggaaaacagggtaatttcaaaaatcttagggaatttgtgtttaagaatattgatggttattttaaaatatattctaagcacacgcctattaatttagtgcgtgatctccctcagggtttttcggctttagaaccattggtagatttgccaataggtattaacatcactaggtttcaaactttacttgctttacatagaagttatttgactcctggtgattcttcttcaggttggacagctggtgctgcagcttattatgtgggttatcttcaacctaggacttttctattaaaatataatgaaaatggaaccattacagatgctgtagactgtgcacttgaccctctctcagaaacaaagtgtacgttgaaatccttcactgtagaaaaaggaatctatcaaacttctaactttagagtccaaccaacagaatctattgttagatttcctaatattacaaacttgtgcccttttggtgaagtttttaacgccaccagatttgcatctgtttatgcttggaacaggaagagaatcagcaactgtgttgctgattattctgtcctatataattccgcatcattttccacttttaagtgttatggagtgtctcctactaaattaaatgatctctgctttactaatgtctatgcagattcatttgtaattagaggtgatgaagtcagacaaatcgctccagggcaaactggaaagattgctgattataattataaattaccagatgattttacaggctgcgttatagcttggaattctaacaatcttgattctaaggttggtggtaattataattacctgtatagattgtttaggaagtctaatctcaaaccttttgagagagatatttcaactgaaatctatcaggccggtagcacaccttgtaatggtgttgaaggttttaattgttactttcctttacaatcatatggtttccaacccactaatggtgttggttaccaaccatacagagtagtagtactttcttttgaacttctacatgcaccagcaactgtttgtggacctaaaaagtctactaatttggttaaaaacaaatgtgtcaatttcaacttcaatggtttaacaggcacaggtgttcttactgagtctaacaaaaagtttctgcctttccaacaatttggcagagacattgctgacactactgatgctgtccgtgatccacagacacttgagattcttgacattacaccatgttcttttggtggtgtcagtgttataacaccaggaacaaatacttctaaccaggttgctgttctttatcagggtgttaactgcacagaagtccctgttgctattcatgcagatcaacttactcctacttggcgtgtttattctacaggttctaatgtttttcaaacacgtgcaggctgtttaataggggctgaacatgtcaacaactcatatgagtgtgacatacccattggtgcaggtatatgcgctagttatcagactcagactaattctcctcggcgggcacgtagtgtagctagtcaatccatcattgcctacactatgtcacttggtgcagaaaattcagttgcttactctaataactctattgccatacccacaaattttactattagtgttaccacagaaattctaccagtgtctatgaccaagacatcagtagattgtacaatgtacatttgtggtgattcaactgaatgcagcaatcttttgttgcaatatggcagtttttgtacacaattaaaccgtgctttaactggaatagctgttgaacaagacaaaaacacccaagaagtttttgcacaagtcaaacaaatttacaaaacaccaccaattaaagattttggtggttttaatttttcacaaatattaccagatccatcaaaaccaagcaagaggtcatttattgaagatctacttttcaacaaagtgacacttgcagatgctggcttcatcaaacaatatggtgattgccttggtgatattgctgctagagacctcatttgtgcacaaaagtttaacggccttactgttttgccacctttgctcacagatgaaatgattgctcaatacacttctgcactgttagcgggtacaatcacttctggttggacctttggtgcaggtgctgcattacaaataccatttgctatgcaaatggcttataggtttaatggtattggagttacacagaatgttctctatgagaaccaaaaattgattgccaaccaatttaatagtgctattggcaaaattcaagactcactttcttccacagcaagtgcacttggaaaacttcaagatgtggtcaaccaaaatgcacaagctttaaacacgcttgttaaacaacttagctccaattttggtgcaatttcaagtgttttaaatgatatcctttcacgtcttgacaaagttgaggctgaagtgcaaattgataggttgatcacaggcagacttcaaagtttgcagacatatgtgactcaacaattaattagagctgcagaaatcagagcttctgctaatcttgctgctactaaaatgtcagagtgtgtacttggacaatcaaaaagagttgatttttgtggaaagggctatcatcttatgtccttccctcagtcagcacctcatggtgtagtcttcttgcatgtgacttatgtccctgcacaagaaaagaacttcacaactgctcctgccatttgtcatgatggaaaagcacactttcctcgtgaaggtgtctttgtttcaaatggcacacactggtttgtaacacaaaggaatttttatgaaccacaaatcattactacagacaacacatttgtgtctggtaactgtgatgttgtaataggaattgtcaacaacacagtttatgatcctttgcaacctgaattagactcattcaaggaggagttagataaatattttaagaatcatacatcaccagatgttgatttaggtgacatctctggcattaatgcttcagttgtaaacattcaaaaagaaattgaccgcctcaatgaggttgccaagaatttaaatgaatctctcatcgatctccaagaacttggaaagtatgagcagtatataaaatggccatggtacatttggctaggttttatagctggcttgattgccatagtaatggtgacaattatgctttgctgtatgaccagttgctgtagttgtctcaagggctgttgttcttgtggatcctgctgcaaatttgatgaagacgactctgagccagtgctcaaaggagtcaaattacattacacataaacgaacttatggatttgtttatgagaatcttcacaattggaactgtaactttgaagcaaggtgaaatcaaggatgctactccttcagattttgttcgcgctactgcaacgataccgatacaagcctcactccctttcggatggcttattgttggcgttgcacttcttgctgtttttcagagcgcttccaaaatcataaccctcaaaaagagatggcaactagcactctccaagggtgttcactttgtttgcaacttgctgttgttgtttgtaacagtttactcacaccttttgctcgttgctgctggccttgaagccccttttctctatctttatgctttagtctacttcttgcagagtataaactttgtaagaataataatgmggctttggctttgctggaaatgccgttccaaaaacccattactttatgatgccaactattttctttgctggcatactaattgttacgactattgtataccttacaatagtgtaacttcttcaattgtcattacttcaggtgatggcacaacaagtcctatttctgaacatgactaccagattggtggttatactgaaaaatgggaatctggagtaaaagactgtgttgtattacacagttacttcacttcagactattaccagctgtactcaactcaattgagtacagacactggtgttgaacatgttaccttcttcatctacaataaaattgttgatgagcctgaagaacatgtccaaattcacacaatcgacggttcatccggagttgttaatccagtaatggaaccaatttatgatgaaccgacgacgactactagcgtgcctttgtaagcacaagctgatgagtacgaacttatgtactcattcgtttcggaagagacaggtacgttaatagttaatagcgtacttctttttcttgctttcgtggtattcttgctagttacactagccatccttactgcgcttcgattgtgtgcgtactgctgcaatattgttaacgtgagtcttgtaaaaccttctttttacgtttactctcgtgttaaaaatctgaattcttctagagttcctgatcttccggtctaaacgaactaaatattatattagtttttctgtttggaactttaattttagccatggcagattccaacggtactattaccgttgaagagcttaaaaagctccttgaacaatggaacctagtaataggtttcctattccttacatggatttgtcttctacaatttgcctatgccaacaggaataggtttttgtatataattaagttaattttcctctggctgttatggccagtaactttagcttgttttgtgcttgctgctgtttacagaataaattggatcaccggtggaattgctatcgcaatggcttgtcttgtaggcttgatgtggctcagctacttcattgcttctttcagactgtttgcgcgtacgcgttccatgtggtcattcaatccagaaactaacattcttctcaacgtgccactccatggcactattctgaccagaccgcttctagaaagtgaactcgtaatcggagctgtgatccttcgtggacatcttcgtattgctggacaccatctaggacgctgtgacatcaaggacctgcctaaagaaatcactgttgctacatcacgaacgctttcttattacaaattgggagcttcgcagcgtgtagcaggtgactcaggttttgctgcatacagtcgctacaggattggcaactataaattaaacacagaccattccagtagcagtgacaatattgctttgcttgtacagtaagtgacaacagatgtttcatctcgttgactttcaggttactatagcagagatattactaattattatgaggacttttaaagtttccatttggaatcttgattacatcataaacctcataattaaaaatttatctaagtcactaactgagaataaatattctcaattagatgaagagcaaccaatggagattgattaaacgaacatgaaaattattcttttcttggcactgataacactcgctacttgtgagctttatcactaccaagagtgtgttagaggtacaacagtacttttaaaagaaccttgctcttctggaacatacgagggcaattcaccatttcatcctctagctgataacaaatttgcactgacttgctttagcactcaatttgcttttgcttgtcctgacggcgtaaaacacgtctatcagttacgtgccagatcagtttcacctaaactgttcatcagacaagaggaagttcaagaactttactctccaatttttcttattgttgcggcaatagtgtttataacactttgcttcacactcaaaagaaagacagaatgattgaactttcattaattgacttctatttgtgctttttagcctttctgctattccttgttttaattatgcttattatcttttggttctcacttgaactgcaagatcataatgaaacttgtcacgcctaaacgaacatgaaatttcttgttttcttaggaatcatcacaactgtagctgcatttcaccaagaatgtagtttacagtcatgtactcaacatcaaccatatgtagttgatgacccgtgtcctattcacttctattctaaatggtatattagagtaggagctagaaaatcagcacctttaattgaattgtgcgtggatgaggctggttctaaatcacccattcagtacatcgatatcggtaattatacagtttcctgtttaccttttacaattaattgccaggaacctaaattgggtagtcttgtagtgcgttgttcgttctatgaagactttttagagtatcatgacgttcgtgttgttttagatttcatctaaacgaacaaactaaaatgtctgataatggaccccaaaatcagcgaaatgcaccccgcattacgtttggtggaccctcagattcaactggcagtaaccagaatggagaacgcagtggggcgcgatcaaaacaacgtcggccccaaggtttacccaataatactgcgtcttggttcaccgctctcactcaacatggcaaggaagaccttaaattccctcgaggacaaggcgttccaattaacaccaatagcagtccagatgaccaaattggctactaccgaagmgctaccagacgaattcgtggtggtgacggtaaaatgaaagatctcagtccaagatggtatttctactacctaggaactgggccagaagctggacttccctatggtgctaacaaagacggcatcatatgggttgcaactgagggagccttgaatacaccaaaagatcacattggcacccgcaatcctgctaacaatgctgcaatcgtgctacaacttcctcaaggaacaacattgccaaaaggcttctacgcagaagggagcagaggcggcagtcaagcctcttctcgttcctcatcacgtagtcgcaacagttcaagaaattcaactccaggcagcagtaggggaacttctcctgctagaatggctggcaatggcggtgatgctgctcttgctttgctgctgcttgacagattgaaccagcttgagagcaaaatgtctggtaaaggccaacaacaacaaggccaaactgtcactaagaaatctgctgctgaggcttctaagaagcctcggcaaaaacgtactgccactaaagcatacaatgtaacacaagctttcggcagacgtggtccagaacaaacccaaggaaattttggggaccaggaactaatcagacaaggaactgattacaaacattggccgcaaattgcacaatttgcccccagcgcttcagcgttcttcggaatgtcgcgcattggcatggaagtcacaccttcgggaacgtggttgacctacacaggtgccatcaaattggatgacaaagatccaaatttcaaagatcaagtcattttgctgaataagcatattgacgcatacaaaacattcccaccaacagagcctaaaaaggacaaaaagaagaaggctgatgaaactcaagccttaccgcagagacagaagaaacagcaaactgtgactcttcttcctgctgcagatttggatgatttctccaaacaattgcaacaatccatgagcagtgctgactcaactcaggcctaaactcatgcagaccacacaaggcagatgggctatataaacgttttcgcttttccgtttacgatatatagtctactcttgtgcagaatgaattctcgtaactacatagcacaagtagatgtagttaactttaatctcacatagcaatctttaatcagtgtgtaacattagggaggacttgaa

SEQ ID NO: 45 - DNA, 29730 bp, synthetic construct
  misc_feature 1..29730: note = Reconstituted virus 8
  source 1..29730: mol_type = other DNA
tttataccttcccaggtaacaaaccaaccaactttcgatctcttgtagatctgttctctaaacgaactttaaaatctgtgtggctgtcactcggctgcatgcttagtgcactcacgcagtataattaataactaattactgtcgttgacaggacacgagtaactcgtctatcttctgcaggctgcttacggtttcgtccgtgttgcagccgatcatcagcacatctaggttttgtccgggtgtgaccgaaaggtaagatggagagccttgtccctggtttcaacgagaaaacacacgtccaactcagtttgcctgttttacaggttcgcgacgtgctcgtacgtggctttggagactccgtggaggaggtcttatcagaggcacgtcaacatcttaaagatggcacttgtggcttagtagaagttgaaaaaggcgttttgcctcaacttgaacagccctatgtgttcatcaaacgttcggatgctcgaactgcacctcatggtcatgttatggttgagctggtagcagaactcgaaggcattcagtacggtcgtagtggtgagacacttggtgtccttgtccctcatgtgggcgaaataccagtggcttaccgcaaggttcttcttcgtaagaacggtaataaaggagctggtggccatagttacggcgccgatctaaagtcatttgacttaggcgacgagcttggcactgatccttatgaagattttcaagaaaactggaacactaaacatagcagtggtgttacccgtgaactcatgcgtgagcttaacggaggggcatacactcgctatgtcgataacaacttctgtggccctgatggctaccctcttgagtgcattaaagaccttctagcacgtgctggtaaagcttcatgcactttgtccgaacaactggactttattgacactaagaggggtgtatactgctgccgtgaacatgagcatgaaattgcttggtacacggaacgttctgaaaagagctatgaattgcagacaccttttgaaattaaattggcaaagaaatttgacaccttcaatggggaatgtccaaattttgtatttcccttaaattccataatcaagactattcaaccaagggttgaaaagaaaaagcttgatggctttatgggtagaattcgatctgtctatccagttgcgtcaccaaatgaatgcaaccaaatgtgcctttcaactctcatgaagtgtgatcattgtggtgaaacttcatggcagacgggcgattttgttaaagccacttgcgaattttgtggcactgagaatttgactaaagaaggtgccactacttgtggttacttaccccaaaatgctgttgttaaaatttattgtccagcatgtcacaattcagaagtaggacctgagcatagtcttgccgaataccataatgaatctggcttgaaaaccattcttcgtaagggtggtcgcactattgcctttggaggctgtgtgttctcttatgttggttgccataacaagtgtgcctattgggttccacgtgctagcgctaacataggttgtaaccatacaggtgttgttggagaaggttccgaaggtcttaatgacaaccttcttgaaatactccaaaaagagaaagtcaacatcaatattgttggtgactttaaacttaatgaagagatcgccattattttggcatctttttctgcttccacaagtgcttttgtggaaactgtgaaaggtttggattataaagcattcaaacaaattgttgaatcctgtggtaattttaaagttacaaaaggaaaagctaaaaaaggtgcctggaatattggtgaacagaaatcaatactgagtcctctttatgcatttgcatcagaggctgctcgtgttgtacgatcaattttctcccgcactcttgaaactgctcaaaattctgtgcgtgttttacagaaggccgctataacaatactagatggaatttcacagtattcactgagactcattgatgctatgatgttcacatctgatttggctactaacaatctagttgtaatggcctacattacaggtggtgttgttcagttgacttcgcagtggctaactaacatctttggcactgtttatgaaaaactcaaacccgtccttgattggcttgaagagaagtttaaggaaggtgtagagtttcttagagacggttgggaaattgttaaatttatctcaacctgtgcttgtgaaattgtcggtggacaaattgtcacctgtgcaaaggaaattaaggagagtgttcagacattctttaagcttgtaaataaatttttggctttgtgtgctgactctatcattattggtggagctaaacttaaagccttgaatttaggtgaaacatttgtcacgcactcaaagggattgtacagaaagtgtgttaaatccagagaagaaactggcctactcatgcctctaaaagccccaaaagaaattatcttcttagagggagaaacacttcccacagaagtgttaacagaggaagttgtcttgaaaactggtgatttacaaccattagaacaacctactagtgaagctgttgaagctccattggttggtacaccagtttgtattaacgggcttatgttgctcgaaatcaaagacacagaaaagtactgtgcccttgcacctaatatgatggtaacaaacaataccttcacactcaaaggcggtgcaccaacaaaggttacttttggtgatgacactgtgatagaagtgcaaggttacaagagtgtgaatatcacttttgaacttgatgaaaggattgataaagtacttaatgagaagtgctctgcctatacagttgaactcggtacagaagtaaatgagttcgcctgtgttgtggcagatgctgtcataaaaactttgcaaccagtatctgaattacttacaccactgggcattgatttagatgagtggagtatggctacatactacttatttgatgagtctggtgagtttaaattggcttcacatatgtattgttctttttaccctccagatgaggatgaagaagaaggtgattgtgaagaagaagagtttgagccatcaactcaatatgagtatggtactgaagatgattaccaaggtaaacctttggaatttggtgccacttctgctgctcttcaacctgaagaagagcaagaagaagattggttagatgatgatagtcaacaaactgttggtcaacaagacggcagtgaggacaatcagacaactactattcaaacaattgttgaggttcaacctcaattagagatggaacttacaccagttgttcagactattgaagtgaatagttttagtggttatttaaaacttactgacaatgtatacattaaaaatgcagacattgtggaagaagctaaaaaggtaaaaccaacagtggttgttaatgcagccaatgtttaccttaaacatggaggaggtgttgcaggagccttaaataaggctactaacaatgccatgcaagttgaatctgatgattacatagctactaatggaccacttaaagtgggtggtagttgtgttttaagcggacacaatcttgctaaacactgtcttcatgttgtcggcccaaatgttaacaaaggtgaagacattcaacttcttaagagtgcttatgaaaattttaatcagcacgaagttctacttgcaccattattatcagctggtatttttggtgctgaccctatacattctttaagagtttgtgtagatactgttcgcacaaatgtctacttagctgtctttgataaaaatctctatgacaaacttgtttcaagctttttggaaatgaagagtgaaaagcaagttgaacaaaagatcgctgagattcctaaagaggaagttaagccatttataactgaaagtaaaccttcagttgaacagagaaaacaagatgataagaaaatcaaagcttgtgttgaagaagttacaacaactctggaagaaactaagttcctcacagaaaacttgttactttatattgacattaatggcaatcttcatccagattctgccactcttgttagtgacattgacatcactttcttaaagaaagatgctccatatatagtgggtgatgttgttcaagagggtgttttaactgctgtggttatacctactaaaaaggctggtggcactactgaaatgctagcgaaagctttgagaaaagtgccaacagacaattatataaccacttacccgggtcagggtttaaatggttacactgtagaggaggcaaagacagtgcttaaaaagtgtaaaagtgccttttacattctaccatctattatctctaatgagaagcaagaaattcttggaactgtttcttggaatttgcgagaaatgcttgcacatgcagaagaaacacgcaaattaatgcctgtctgtgtggaaactaaagccatagtttcaactatacagcgtaaatataagggtattaaaatacaagagggtgtggttgattatggtgctagattttacttttacaccagtaaaacaactgtagcgtcacttatcaacacacttaacgatctaaatgaaactcttgttacaatgccacttggctatgtaacacatggcttaaatttggaagaagctgctcggtatatgagatctctcaaagtgccagctacagtttctgtttcttcacctgatgctgttacagcgtataatggttatcttacttcttcttctaaaacacctgaagaacattttattgaaaccatctcacttgctggttcctataaagattggtcctattctggacaatctacacaactaggtatagaatttcttaagagaggtgataaaagtgtatattacactagtaatcctaccacattccacctagatggtgaagttatcacctttgacaatcttaagacacttctttctttgagagaagtgaggactattaaggtgtttacaacagtagacaacattaacctccacacgcaagttgtggacatgtcaatgacatatggacaacagtttggtccaacttatttggatggagctgatgttactaaaataaaacctcataattcacatgaaggtaaaacattttatgttttacctaatgatgacactctacgtgttgaggcttttgagtactaccacacaactgatcctagttttctgggtaggtacatgtcagcattaaatcacactaaaaagtggaaatacccacaagttaatggtttaacttctattaaatgggcagataacaactgttatcttgccactgcattgttaacactccaacaaatagagttgaagtttaatccacctgctctacaagatgcttattacagagcaagggctggtgaagctgctaacttttgtgcacttatcttagcctactgtaataagacagtaggtgagttaggtgatgttagagaaacaatgagttacttgtttcaacatgccaatttagattcttgcaaaagagtcttgaacgtggtgtgtaaaacttgtggacaacagcagacaacccttaagggtgtagaagctgttatgtacatgggcacactttcttatgaacaatttaagaaaggtgttcagataccttgtacgtgtggtaaacaagctacaaaatatctagtacaacaggagtcaccttttgttatgatgtcagcaccacctgctcagtatgaacttaagcatggtacatttacttgtgctagtgagtacactggtaattaccagtgtggtcactataaacatataacttctaaagaaactttgtattgcatagacggtgctttacttacaaagtcctcagaatacaaaggtcctattacggatgttttctacaaagaaaacagttacacaacaaccataaaaccagttacttataaattggatggtgttgtttgtacagaaattgaccctaagttggacaattattataagaaagacaattnntatttcacagagcaaccaattgatcttgtaccaaaccaaccatatccaaacgcaagcttcgataattttaagtttgtatgtgataatatcaaatttgctgatgatttaaaccagttaactggttataagaaacctgcttcaagagagcttaaagttacatttttccctgacttaaatggtgatgtggtggctattgattataaacactacacaccctcttttaagaaaggagctaaattgttacataaacctattgtttggcatgttaacaatgcaactaataaagccacgtataaaccaaatacctggtgtatacgttgtctttggagcacaaaaccagttgaaacatcaaattcgtttgatgtactgaagtcagaggacgcgcagggaatggataatcttgcctgcgaagatctaaaaccagtctctgaagaagtagtggaaaatcctaccatacagaaagacgttcttgagtgtaatgtgaaaactaccgaagttgtaggagacattatacttaaaccagcaaataatagtttaaaaattacagaagaggttggccacacagatctaatggctgcttatgtagacaattctagtcttactattaagaaacctaatgaattatctagagtattaggtttgaaaacccttgctactcatggtttagctgctgttaatagtgtcccttgggatactatagctaattatgctaagccttttcttaacaaagttgttagtacaactactaacatagttacacggtgtttaaaccgtgtttgtactaattatatgccttatttctttactttattgctacaattgtgtacttttactagaagtacaaattctagaattaaagcatctatgccgactactatagcaaagaatactgttaagagtgtcggtaaattttgtctagaggcttcatttaattatttgaagtcacctaatttttctaaactgataaatattataatttggtttttactattaagtgtttgcctaggttctttaatctactcaaccgctgctttaggtgttttaatgtctaatttaggcatgccttcttactgtactggttacagagaaggctatttgaactctactaatgtcactattgcaacctactgtactggttctataccttgtagtgtttgtcttagtggtttagattctttagacacctatccttctttagaaactatacaaattaccatttcatcttttaaatgggatttaactgcttttggcttagttgcagagtggtttttggcatatattcttttcactaggtttttctatgtacttggattggctgcaatcatgcaattgtttttcagctattttgcagtacattttattagtaattcttggcttatgtggttaataattaatcttgtacaaatggccccgatttcagctatggttagaatgtacatcttctttgcatcattttattatgtatggaaaagttatgtgcatgttgtagacggttgtaattcatcaacttgtatgatgtgttacaaacgtaatagagcaacaagagtcgaatgtacaactattgttaatggtgttagaaggtccttttatgtctatgctaatggaggtaaaggcttttgcaaactacacaattggaattgtgttaattgtgatacattctgtgctggtagtacatttattagtgatgaagttgcgagagacttgtcactacagtttaaaagaccaataaatcctactgaccagtcttcttacatcgttgatagtgttacagtgaagaatggttccatccatctttactttgataaagctggtcaaaagacttatgaaagacattctctctctcattttgttaacttagacaacctgagagctaataacactaaaggttcattgcctattaatgttatagtttttgatggtaaatcaaaatgtgaagaatcatctgcaaaatcagcgtctgtttactacagtcagcttatgtgtcaacctatactgttactagatcaggcattagtgtctgatgttggtgatagtgcggaagttgcagttaaaatgtttgatgcttacgttaatacgttttcatcaacttttaacgtaccaatggaaaaactcaaaacactagttgcaactgcagaagctgaacttgcaaagaatgtgtccttagacaatgtcttatctacttttatttcagcagctcggcaagggtttgttgattcagatgtagaaactaaagatgttgttgaatgtcttaaattgtcacatcaatctgacatagaagttactggcgatagttgtaataactatatgctcacctataacaaagttgaaaacatgacaccccgtgaccttggtgcttgtattgactgtagtgcgcgtcatattaatgcgcaggtagcaaaaagtcacaacattgctttgatatggaacgttaaagatttcatgtcattgtctgaacaactacgaaaacaaatacgtagtgctgctaaaaagaataacttaccttttaagttgacatgtgcaactactagacaagttgttaatgttgtaacaacaaagatagcacttaagggtggtaaaattgttaataattggttgaagcagttaattaaagttacacttgtgttcctttttgttgctgctattttctatttaataacacctgttcatgtcatgtctaaacatactgacttttcaagtgaaatcataggatacaaggctattgatggtggtgtcactcgtgacatagcatctacagatacttgttttgctaacaaacatgctgattttgacacatggtttagccagcgtggtggtagttatactaatgacaaagcttgcccattgattgctgcagtcataacaagagaagtgggttttgtcgtgcctggtttgcctggcacgatattacgcacaactaatggtgactttttgcatttcttacctagagtttttagtgcagttggtaacatctgttacacaccatcaaaacttatagagtacactgactttgcaacatcagcttgtgttttggctgctgaatgtacaatttttaaagatgcttctggtaagccagtaccatattgttatgataccaatgtactagaaggttctgttgcttatgaaagtttacgccctgacacacgttatgtgctcatggatggctctattattcaatttcctaacacctaccttgaaggttctgttagagtggtaacaacttttgattctgagtactgtaggcacggcacttgtgaaagatcagaagctggtgtttgtgtatctactagtggtagatgggtacttaacaatgattattacagatctttaccaggagttttctgtggtgtagatgctgtaaatttacttactaatatgtttacaccactaattcaacctattggtgctttggacatatcagcatctatagtagctggtggtattgtagctatcgtagtaacatgccttgcctactattttatgaggtttagaagagcttttggtgaatacagtcatgtagttgcctttaatactttactattccttatgtcattcactgtactctgtttaacaccagtttactcattcttacctggtgtttattctgttatttacttgtacttgacattttatcttactaatgatgtttcnnttttagcacatattcagtggatggttatgttcacacctttagtacctttctggataacaattgcttatatcatttgtatttccacaaagcatttctattggttctttagtaattacctaaagagacgtgtagtctttaatggtgtttcctttagtacttttgaagaagctgcgctgtgcacctttttgttaaataaagaaatgtatctaaagttgcgtagtgatgtgctattacctcttacgcaatataatagatacttagctctttataataagtacaagtattttagtggagcaatggatacaactagctacagagaagctgcttgttgtcatctcgcaaaggctctcaatgacttcagtaactcaggttctgatgttctttaccaaccaccacaaacctctatcacctcagctgttttgcagagtggttttagaaaaatggcattcccatctggtaaagttgagggttgtatggtacaagtaacttgtggtacaactacacttaacggtctttggcttgatgacgtagtttactgtccaagacatgtgatctgcacctctgaagacatgcttaaccctaattatgaagatttactcattcgtaagtctaatcataatttcttggtacaggctggtaatgttcaactcagggttattggacattctatgcaaaattgtgtacttaagcttaaggttgatacagccaatcctaagacacctaagtataagtttgttcgcattcaaccaggacagactttttcagtgttagcttgttacaatggttcaccatctggtgtttaccaatgtgctatgaggcccaatttcactattaagggttcattccttaatggttcatgtggtagtgttggttttaacatagattatgactgtgtctctttttgttacatgcaccatatggaattaccaactggagttcatgctggcacagacttagaaggtaacttttatggaccttttgttgacaggcaaacagcacaagcagctggtacggacacaactattacagttaatgttttagcttggttgtacgctgctgttataaatggagacaggtggtttctcaatcgatttaccacaactcttaatgactttaaccttgtggctatgaagtacaattatgaacctctaacacaagaccatgttgacatactaggacctctttctgctcaaactggaattgccgttttagatatgtgtgcttcattaaaagaattactgcaaaatggtatgaatggacgtaccatattgggtagtgctttattagaagatgaatttacaccttttgatgttgttagacaatgctcaggtgttactttccaaagtgcagtgaaaagaacaatcaagggtacacaccactggttgttactcacaattttgacttcacttttagttttagtccagagtactcaatggtctttgttcttttttttgtatgaaaatgcctttttaccttttgctatgggtattattgctatgtctgcttttgcaatgatgtttgtcaaacataagcatgcatttctctgtttgtttttgttaccttctcttgccactgtagcttattttaatatggtctatatgcctgctagttgggtgatgcgtattatgacatggttggatatggttgatactagtttgtctggttttaagctaaaagactgtgttatgtatgcatcagctgtagtgttactaatccttatgacagcaagaactgtgtatgatgatggtgctaggagagtgtggacacttatgaatgtcttgacactcgtttataaagtttattatggtaatgctttagatcaagccatttccatgtgggctcttataatctctgttacttctaactactcaggtgtagttacaactgtcatgtttttggccagaggtattgtttttatgtgtgttgagtattgccctattttcttcataactggtaatacacttcagtgtataatgctagtttattgtttcttaggctatttttgtacttgttactttggcctcttttgtttactcaaccgctactttagactgactcttggtgtttatgattacttagtttctacacaggagtttagatatatgaattcacagggactactcccacccaagaatagcatagatgccttcaaactcaacattaaattgttgggtgttggtggcaaaccttgtatcaaagtagccactgtacagtctaaaatgtcagatgtaaagtgcacatcagtagtcttactctcagttttgcaacaactcagagtagaatcatcatctaaattgtgggctcaatgtgtccagttacacaatgacattctcttagctaaagatactactgaagcctttgaaaaaatggtttcactactttctgttttgctttccatgcagggtgctgtagacataaacaagctttgtgaagaaatgctggacaacagggcaaccttacaagctatagcctcagagtttagttcccttccatcatatgcagcttttgctactgctcaagaagcttatgagcaggctgttgctaatggtgattctgaagttgttcttaaaaagttgaagaagtctttgaatgtggctaaatctgaatttgaccgtgatgcagccatgcaacgtaagttggaaaagatggctgatcaagctatgacccaaatgtataaacaggctagatctgaggacaagagggcaaaagttactagtgctatgcagacaatgcttttcactatgcttagaaagttggataatgatgcactcaacaacattatcaacaatgcaagagatggttgtgttcccttgaacataatacctcttacaacagcagccaaactaatggttgtcataccagactataacacatataaaaatacgtgtgatggtacaacatttacttatgcatcagcattgtgggaaatccaacaggttgtagatgcagatagtaaaattgttcaacttagtgaaattagtatggacaattcacctaatttagcatggcctcttattgtaacagctttaagggccaattctgctgtcaaattacagaataatgagcttagtcctgttgcactacgacagatgtcttgtgctgccggtactacacaaactgcttgcactgatgacaatgcgttagcttactacaacacaacaaagggaggtaggtttgtacttgcactgttatccgatttacaggatttgaaatgggctagattccctaagagtgatggaactggtactatctatacagaactggaaccaccttgtaggtttgttacagacacacctaaaggtcctaaagtgaagtatttatactttattaaaggattaaacaacctaaatagaggtatggtacttggtagtttagctgccacagtacgtctacaagctggtaatgcaacagaagtgcctgccaattcaactgtattatctttctgtgcttttgctgtagatgctgctaaagcttacaaagattatctagctagtgggggacaaccaatcactaattgtgttaagatgttgtgtacacacactggtactggtcaggcaataacagttacaccggaagccaatatggatcaagaatcctttggtggtgcatcgtgttgtctgtactgccgttgccacatagatcatccaaatcctaaaggattttgtgacttaaaaggtaagtatgtacaaatacctacaacttgtgctaatgaccctgtgggttttacacttaaaaacacagtctgtaccgtctgcggtatgtggaaaggttatggctgtagttgtgatcaactccgcgaacccatgcttcagtcagctgatgcacaatcgtttttaaacgggtttgcggtgtaagtgcagcccgtcttacaccgtgcggcacaggcactagtactgatgtcgtatacagggcttttgacatctacaatgataaagtagctggttttgctaaattcctaaaaactaattgttgtcgcttccaagaaaaggacgaagatgacaatttaattgattcttactttgtagttaagagacacactttctctaactaccaacatgaagaaacaatttataatttacttaaggattgtccagctgttgctaaacatgacttctttaagtttagaatagacggtgacatggtaccacatatatcacgtcaacgtcttactaaatacacaatggcagacctcgtctatgctttaaggcattttgatgaaggtaattgtgacacattaaaagaaatacttgtcacatacaattgttgtgatgatgattatttcaataaaaaggactggtatgattttgtagaaaacccagatatattacgcgtatacgccaacttaggtgaacgtgtacgccaagctttgttaaaaacagtacaattctgtgatgccatgcgaaatgctggtattgttggtgtactgacattagataatcaagatctcaatggtaactggtatgatttcggtgatttcatacaaaccacgccaggtagtggagttcctgttgtagattcttattattcattgttaatgcctatattaaccttgaccagggctttaactgcagagtcacatgttgacactgacttaacaaagccttacattaagtgggatttgttaaaatatgacttcacggaagagaggttaaaactctttgaccgttattttaaatattgggatcagacataccacccaaattgtgttaactgtttggatgacagatgcattctgcattgtgcaaactttaatgttttattctctacagtgttcccacttacaagttttggaccactagtgagaaaaatatttgttgatggtgttccatttgtagtttcaactggataccacttcagagagctaggtgttgtacataatcaggatgtaaatttacatagctctagacttagttttaaggaattacttgtgtatgctgctgaccctgctatgcacgctgcttctggtaatctattactagataaacgcactacgtgcttttcagtagctgcacttactaacaatgttgcttttcaaactgtcaaacccggtaattttaacaaagacttctatgactttgctgtgtctaagggtttctttaaggaaggaagttctgttgaattaaaacacttcttctttgctcaggatggtaatgctgctatcagcgattatgactactatcgttataatctaccaacaatgtgtgatatcagacaactactatttgtagttgaagttgttgataagtactttgattgttacgatggtggctgtattaatgctaaccaagtcatcgtcaacaacctagacaaatcagctggttttccatttaataaatggggtaaggctagactttattatgattcaatgagttatgaggatcaagatgcacttttcgcatatacaaaacgtaatgtcatccctactataactcaaatgaatcttaagtatgccattagtgcaaagaatagagctcgcaccgtagctggtgtctctatctgtagtactatgaccaatagacagtttcatcaaaaattattgaaatcaatagccgccactagaggagctactgtagtaattggaacaagcaaattctatggtggttggcacaacatgttaaaaactgtttatagtgatgtagaaaaccctcaccttatgggttgggattatcctaaatgtgatagagccatgcctaatatgcttagaattatggcctcacttgttcttgctcgcaaacatacaacgtgttgtagcttgtcacaccgtttctatagattagctaatgagtgtgctcaagtattgagtgaaatggtcatgtgtggcggttcactatatgttaaaccaggtggaacctcatcaggagatgccacaactgcttatgctaatagtgtttttaacatttgtcaagctgtcacggccaatgttaatgcacttttatctactgatggtaacaaaattgccgataagtatgtccgcaatttacaacacagactttatgagtgtctctatagaaatagagatgttgacacagactttgtgaatgagttttacgcatatttgcgtaaacatttctcaatgatgatactctctgacgatgctgttgtgtgtttcaatagcacttatgcatctcaaggtctagtggctagcataaagaactttaagtcagttctttattatcaaaacaatgtttttatgtctgaagcaaaatgttggactgagactgaccttactaaaggacctcatgaattttgctctcaacatacaatgctagttaaacagggtgatgattatgtgtaccttccttacccagatccatcaagaatcctaggggccggctgttttgtagatgatatcgtaaaaacagatggtacacttatgattgaacggttcgtgtctttagctatagatgcttacccacttactaaacatcctaatcaggagtatgctgatgtctttcatttgtacttacaatacataagaaagctacatgatgagttaacaggacacatgttagacatgtattctgttatgcttactaatgataacacttcaaggtattgggaacctgagttttatgaggctatgtacacaccgcatacagtcttacaggctgttggggcttgtgttctttgcaattcacagacttcattaagatgtggtgcttgcatacgtagaccattcttatgttgtaaatgctgttacgaccatgtcatatcaacatcacataaattagtcttgtctgttaatccgtatgtttgcaatgctccaggttgtgatgtcacagatgtgactcaactttacttaggaggtatgagctattattgtaaatcacataaaccacccattagttttccattgtgtgctaatggacaagtttttggtttatataaaaatacatgtgttggtagcgataatgttactgactttaatgcaattgcaacatgtgactggacaaatgctggtgattacattttagctaacacctgtactgaaagactcaagctttttgcagcagaaacgctcaaagctactgaggagacatttaaactgtcttatggtattgctactgtacgtgaagtgctgtctgacagagaattacatctttcatgggaagttggtaaacctagaccaccacttaaccgaaattatgtctttactggttatcgtgtaactaaaaacagtaaagtacaaataggagagtacacctttgaaaaaggtgactatggtgatgctgttgtttaccgaggtacaacaacttacaaattaaatgttggtgattattttgtgctgacatcacatacagtaatgccattaagtgcacctacactagtgccacaagagcactatgttagaattactggcttatacccaacactcaatatctcagatgagttttctagcaatgttgcaaattatcaaaaggttggtatgcaaaagtattctacactccagggaccacctggtactggtaagagtcattttgctattggcctagctctctactacccttctgctcgcatagtgtatacagcttgctctcatgccgctgttgatgcactatgtgagaaggcattaaaatatttgcctatagataaatgtagtagaattatacctgcacgtgctcgtgtagagtgttttgataaattcaaagtgaattcaacattagaacagtatgtcttttgtactgtaaatgcattgcctgagacgacagcagatatagttgtctttgatgaaatttcaatggccacaaattatgatttgagtgttgtcaatgccagattacgtgctaagcactatgtgtacattggcgaccctgctcaattacctgcaccacgcacattgctaactaagggcacactagaaccagaatatttcaattcagtgtgtagacttatgaaaactataggtccagacatgttcctcggaacttgtcggcgttgtcctgctgaaattgttgacactgtgagtgctttggtttatgataataagcttaaagcacataaagacaaatcagctcaatgctttaaaatgttttataagggtgttatcacgcatgatgtttcatctgcaattaacaggccacaaataggcgtggtaagagaattccttacacgtaaccctgcttggagaaaagctgtctttatttcaccttataattcacagaatgctgtagcctcaaagattttgggactaccaactcaaactgttgattcatcacagggctcagaatatgactatgtcatattcactcaaaccactgaaacagctcactcttgtaatgtaaacagatttaatgttgctattaccagagcaaaagtaggcatactttgcataatgtctgatagagacctttatgacaagttgcaatttacaagtcttgaaattccacgtaggaatgtggcaactttacaagctgaaaatgtaacaggactctttaaagattgtagtaaggtaatcactgggttacatcctacacaggcacctacacacctcagtgttgacactaaattcaaaactgaaggtttatgtgttgacatacctggcatacctaaggacatgacctatagaagactcatctctatgatgggttttaaaatgaattatcaagttaatggttaccctaacatgtttatcacccgcgaagaagctataagacatgtacgtgcatggattggcttcgatgtcgaggggtgtcatgctactagagaagctgttggtaccaatttacctttacagctaggtttttctacaggtgttaacctagttgctgtacctacaggttatgttgatacacctaataatacagatttttccagagttagtgctaaaccaccgcctggagatcaatttaaacacctcataccacttatgtacaaaggacttccttggaatgtagtgcgtataaagattgtacaaatgttaagtgacacacttaaaaatctctctgacagagtcgtatttgtcttatgggcacatggctttgagttgacatctatgaagtattttgtgaaaataggacctgagcgcacctgttgtctatgtgatagacgtgccacatgcttttccactgcttcagacacttatgcctgttggcatcattctattggatttgattacgtctataatccgtttatgattgatgttcaacaatggggttttacaggtaacctacaaagcaaccatgatctgtattgtcaagtccatggtaatgcacatgtagctagttgtgatgcaatcatgactaggtgtctagctgtccacgagtgctttgttaagcgtgttgactggactattgaatatcctataattggtgatgaactgaagattaatgcggcttgtagaaaggttcaacacatggttgttaaagctgcattattagcagacaaattcccagttcttcacgacattggtaaccctaaagctattaagtgtgtacctcaagctgatgtagaatggaagttctatgatgcacagccttgtagtgacaaagcttataaaatagaagaattattctattcttatgccacacattctgacaaattcacagatggtgtatgcctattttggaattgcaatgtcgatagatatcctgctaattccattgtttgtagatttgacactagagtgctatctaaccttaacttgcctggttgtgatggtggcagtttgtatgtaaataaacatgcattccacacaccagcttttgataaaagtgcttttgttaatttaaaacaattaccatttttctattactctgacagtccatgtgagtctcatggaaaacaagtagtgtcagatatagattatgtaccactaaagtctgctacgtgtataacacgttgcaatttaggtggtgctgtctgtagacatcatgctaatgagtacagattgtatctcgatgcttataacatgatgatctcagctggctttagcttgtgggtttacaaacaatttgatacttataacctctggaacacttttacaagacttcagagtttagaaaatgtggcttttaatgttgtaaataagggacactttgatggacaacagggtgaagtaccagtttctatcattaataacactgtttacacaaaagttgatggtgttgatgtagaattgtttgaaaataaaacaacattacctgttaatgtagcatttgagctttgggctaagcgcaacattaaaccagtaccagaggtgaaaatactcaataatttgggtgtggacattgctgctaatactgtgatctgggactacaaaagagatgctccagcacatatatctactattggtgtttgttctatgactgacatagccaagaaaccaactgaaacgatttgtgcaccactcactgtcttttttgatggtagagttgatggtcaagtagacttatttagaaatgcccgtaatggtgttcttattacagaaggtagtgttaaaggtttacaaccatctgtaggtcccaaacaagctagtcttaatggagtcacattaattggagaagccgtaaaaacacagttcaattattataagaaagttgatggtgttgtccaacaattacctgaaacttactttactcagagtagaaatttacaagaatttaaacccaggagtcaaatggaaattgatttcttagaattagctatggatgaattcattgaacggtataaattagaaggctatgccttcgaacatatcgtttatggagattttagtcatagtcagttaggtggtttacatctactgattggactagctaaacgttttaaggaatcaccttttgaattagaagattttattcctatggacagtacagttaaaaactatttcataacagatgcgcaaacaggttcatctaagtgtgtgtgttctgttattgatttattacttgatgattntgttgaaataataaaatcccaagatttatctgtagtttctaaggttgtcaaagtgactattgactatacagaaatttcatttatgctttggtgtaaagatggccatgtagaaacattttacccaaaattacaatctagtcaagcgtggcaaccgggtgttgctatgcctaatctttacaaaatgcaaagaatgctattagaaaagtgtgaccttcaaaattatggtgatagtgcaacattacctaaaggcataatgatgaatgtcgcaaaatatactcaactgtgtcaatatttaaacacattaacattagctgtaccctataatatgagagttatacattttggtgctggttctgataaaggagttgcaccaggtacagctgttttaagacagtggttgcctacgggtacgctgcttgtcgactcagatcttaatgactttgtctctgatgcagattcaactttgattggtgattnngcaactgtacatacagctaataaatgggatctcattattagtgatatgtacgaccctaagactaaaaatgttacaaaagaaaatgactctaaagagggttttttcacttacatttgtgggtttatacaacaaaagctagctcttggaggttccgtggctataaagataacagaacattcttggaatgctgatctttataagctcatgggacacttcgcatggtggacagcctttgttactaatgtgaatgcgtcatcatctgaagcatttttaattggatgtaattatcttggcaaaccacgcgaacaaatagatggttatgtcatgcatgcaaattacatattttggaggaatacaaatccaattcagttgtcttcctattctttatttgacatgagtaaatttccccttaaattaaggggtactgctgttatgtctttaaaagaaggtcaaatcaatgatatgattttatctcttcttagtaaaggtagacttataattagagaaaacaacagagttgttatttctagtgatgttcttgttaacaactaaacgaacaatgtttgtttttcttgttttattgccactagtctctagtcagtgtgttaatcttacaamcagaactcaattacccyctgcatacactaattctttcacacgtggtgtttattaccctgacaaagttttcagatcctcagttttacattcaactcaggacttgttcttacctttcttttccaatgttacttggttccatgctatacatgtctctgggaccaatggtactaagaggtttgataaccctgtcctaccatttaatgatggtgtttattttgcttccactgagaagtctaacataataagaggctggatttttggtactactttagattcgaagacccagtccctacttattgttaataacgctactaatgttgttattaaagtctgtgaatttcaattttgtaatgatccatttttgggtgtttattaccacaaaaacaacaaaagttggatggaaagtgagttcagagtttattctagtgcgaataattgcacttttgaatatgtctctcagccttttcttatggaccttgaaggaaaacagggtaatttcaaaaatcttagggaatttgtgtttaagaatattgatggttattttaaaatatattctaagcacacgcctattaatttagtgcgtgatctccctcagggtttttcggctttagaaccattggtagatttgccaataggtattaacatcactaggtttcaaactttacttgctttacatagaagttatttgactcctggtgattcttcttcaggttggacagctggtgctgcagcttattatgtgggttatcttcaacctaggacttttctattaaaatataatgaaaatggaaccattacagatgctgtagactgtgcacttgaccctctctcagaaacaaagtgtacgttgaaatccttcactgtagaaaaaggaatctatcaaacttctaactttagagtccaaccaacagaatctattgttagatttcctaatattacaaacttgtgcccttttggtgaagtttttaacgccaccagatttgcatctgtttatgcttggaacaggaagagaatcagcaactgtgttgctgattattctgtcctatataattccgcatcattttccacttttaagtgttatggagtgtctcctactaaattaaatgatctctgctttactaatgtctatgcagattcatttgtaattagaggtgatgaagtcagacaaatcgctccagggcaaactggaaagattgctgattataattataaattaccagatgattttacaggctgcgttatagcttggaattctaacaatcttgattctaaggttggtggtaattataattacctgtatagattgtttaggaagtctaatctcaaaccttttgagagagatatttcaactgaaatctatcaggccggtagcacaccttgtaatggtgttgaaggttttaattgttactttcctttacaatcatatggtttccaacccactaatggtgttggttaccaaccatacagagtagtagtactttcttttgaacttctacatgcaccagcaactgtttgtggacctaaaaagtctactaatttggttaaaaacaaatgtgtcaatttcaacttcaatggtttaacaggcacaggtgttcttactgagtctaacaaaaagtttctgcctttccaacaatttggcagagacattgctgacactactgatgctgtccgtgatccacagacacttgagattcttgacattacaccatgttcttttggtggtgtcagtgttataacaccaggaacaaatacttctaaccaggttgctgttctttatcagggtgttaactgcacagaagtccctgttgctattcatgcagatcaacttactcctacttggcgtgtttattctacaggttctaatgtttttcaaacacgtgcaggctgtttaataggggctgaacatgtcaacaactcatatgagtgtgacatacccattggtgcaggtatatgcgctagttatcagactcagactaattctcctcggcgggcacgtagtgtagctagtcaatccatcattgcctacactatgtcacttggtgcagaaaattcagttgcttactctaataactctattgccatacccacaaattttactattagtgttaccacagaaattctaccagtgtctatgaccaagacatcagtagattgtacaatgtacatttgtggtgattcaactgaatgcagcaatcttttgttgcaatatggcagtttttgtacacaattaaaccgtgctttaactggaatagctgttgaacaagacaaaaacacccaagaagtttttgcacaagtcaaacaaatttacaaaacaccaccaattaaagattttggtggttttaatttttcacaaatattaccagatccatcaaaaccaagcaagaggtcatttattgaagatctacttttcaacaaagtgacacttgcagatgctggcttcatcaaacaatatggtgattgccttggtgatattgctgctagagacctcatttgtgcacaaaagtttaacggccttactgttttgccacctttgctcacagatgaaatgattgctcaatacacttctgcactgttagcgggtacaatcacttctggttggacctttggtgcaggtgctgcattacaaataccatttgctatgcaaatggcttataggtttaatggtattggagttacacagaatgttctctatgagaaccaaaaattgattgccaaccaatttaatagtgctattggcaaaattcaagactcactttcttccacagcaagtgcacttggaaaacttcaagatgtggtcaaccaaaatgcacaagctttaaacacgcttgttaaacaacttagctccaattttggtgcaatttcaagtgttttaaatgatatcctttcacgtcttgacaaagttgaggctgaagtgcaaattgataggttgatcacaggcagacttcaaagtttgcagacatatgtgactcaacaattaattagagctgcagaaatcagagcttctgctaatcttgctgctactaaaatgtcagagtgtgtacttggacaatcaaaaagagttgatttttgtggaaagggctatcatcttatgtccttccctcagtcagcacctcatggtgtagtcttcttgcatgtgacttatgtccctgcacaagaaaagaacttcacaactgctcctgccatttgtcatgatggaaaagcacactttcctcgtgaaggtgtctttgtttcaaatggcacacactggtttgtaacacaaaggaatttttatgaaccacaaatcattactacagacaacacatttgtgtctggtaactgtgatgttgtaataggaattgtcaacaacacagtttatgatcctttgcaacctgaattagactcattcaaggaggagttagataaatattttaagaatcatacatcaccagatgttgatttaggtgacatctctggcattaatgcttcagttgtaaacattcaaaaagaaattgaccgcctcaatgaggttgccaagaatttaaatgaatctctcatcgatctccaagaacttggaaagtatgagcagtatataaaatggccatggtacatttggctaggttttatagctggcttgattgccatagtaatggtgacaattatgctttgctgtatgaccagttgctgtagttgtctcaagggctgttgttcttgtggatcctgctgcaaatttgatgaagacgactctgagccagtgctcaaaggagtcaaattacattacacataaacgaacttatggatttgtttatgagaatcttcacaattggaactgtaactttgaagcaaggtgaaatcaaggatgctactccttcagattttgttcgcgctactgcaacgataccgatacaagcctcactccctttcggatggcttattgttggcgttgcacttcttgctgtttttcagagcgcttccaaaatcataaccctcaaaaagagatggcaactagcactctccaagggtgttcactttgtttgcaacttgctgttgttgtttgtaacagtttactcacaccttttgctcgttgctgctggccttgaagccccttttctctatctttatgctttagtctacttcttgcagagtataaactttgtaagaataataatgmggctttggctttgctggaaatgccgttccaaaaacccattactttatgatgccaactattttctttgctggcatactaattgttacgactattgtataccttacaatagtgtaacttcttcaattgtcattacttcaggtgatggcacaacaagtcctatttctgaacatgactaccagattggtggttatactgaaaaatgggaatctggagtaaaagactgtgttgtattacacagttacttcacttcagactattaccagctgtactcaactcaattgagtacagacactggtgttgaacatgttaccttcttcatctacaataaaattgttgatgagcctgaagaacatgtccaaattcacacaatcgacggttcatccggagttgttaatccagtaatggaaccaatttatgatgaaccgacgacgactactagcgtgcctttgtaagcacaagctgatgagtacgaacttatgtactcattcgtttcggaagagacaggtacgttaatagttaatagcgtacttctttttcttgctttcgtggtattcttgctagttacactagccatccttactgcgcttcgattgtgtgcgtactgctgcaatattgttaacgtgagtcttgtaaaaccttctttttacgtttactctcgtgttaaaaatctgaattcttctagagttcctgatcttccggtctaaacgaactaaatattatattagtttttctgtttggaactttaattttagccatggcagattccaacggtactattaccgttgaagagcttaaaaagctccttgaacaatggaacctagtaataggtttcctattccttacatggatttgtcttctacaatttgcctatgccaacaggaataggtttttgtatataattaagttaattttcctctggctgttatggccagtaactttagcttgttttgtgcttgctgctgtttacagaataaattggatcaccggtggaattgctatcgcaatggcttgtcttgtaggcttgatgtggctcagctacttcattgcttctttcagactgtttgcgcgtacgcgttccatgtggtcattcaatccagaaactaacattcttctcaacgtgccactccatggcactattctgaccagaccgcttctagaaagtgaactcgtaatcggagctgtgatccttcgtggacatcttcgtattgctggacaccatctaggacgctgtgacatcaaggacctgcctaaagaaatcactgttgctacatcacgaacgctttcttattacaaattgggagcttcgcagcgtgtagcaggtgactcaggttttgctgcatacagtcgctacaggattggcaactataaattaaacacagaccattccagtagcagtgacaatattgctttgcttgtacagtaagtgacaacagatgtttcatctcgttgactttcaggttactatagcagagatattactaattattatgaggacttttaaagtttccatttggaatcttgattacatcataaacctcataattaaaaatttatctaagtcactaactgagaataaatattctcaattagatgaagagcaaccaatggagattgattaaacgaacatgaaaattattcttttcttggcactgataacactcgctacttgtgagctttatcactaccaagagtgtgttagaggtacaacagtacttttaaaagaaccttgctcttctggaacatacgagggcaattcaccatttcatcctctagctgataacaaatttgcactgacttgctttagcactcaatttgcttttgcttgtcctgacggcgtaaaacacgtctatcagttacgtgccagatcagtttcacctaaactgttcatcagacaagaggaagttcaagaactttactctccaatttttcttattgttgcggcaatagtgtttataacactttgcttcacactcaaaagaaagacagaatgattgaactttcattaattgacttctatttgtgctttttagcctttctgctattccttgttttaattatgcttattatcttttggttctcacttgaactgcaagatcataatgaaacttgtcacgcctaaacgaacatgaaatttcttgttttcttaggaatcatcacaactgtagctgcatttcaccaagaatgtagtttacagtcatgtactcaacatcaaccatatgtagttgatgacccgtgtcctattcacttctattctaaatggtatattagagtaggagctagaaaatcagcacctttaattgaattgtgcgtggatgaggctggttctaaatcacccattcagtacatcgatatcggtaattatacagtttcctgtttaccttttacaattaattgccaggaacctaaattgggtagtcttgtagtgcgttgttcgttctatgaagactttttagagtatcatgacgttcgtgttgttttagatttcatctaaacgaacaaactaaaatgtctgataatggaccccaaaatcagcgaaatgcaccccgcattacgtttggtggaccctcagattcaactggcagtaaccagaatggagaacgcagtggggcgcgatcaaaacaacgtcggccccaaggtttacccaataatactgcgtcttggttcaccgctctcactcaacatggcaaggaagaccttaaattccctcgaggacaaggcgttccaattaacaccaatagcagtccagatgaccaaattggctactaccgaagmgctaccagacgaattcgtggtggtgacggtaaaatgaaagatctcagtccaagatggtatttctactacctaggaactgggccagaagctggacttccctatggtgctaacaaagacggcatcatatgggttgcaactgagggagccttgaatacaccaaaagatcacattggcacccgcaatcctgctaacaatgctgcaatcgtgctacaacttcctcaaggaacaacattgccaaaaggcttctacgcagaagggagcagaggcggcagtcaagcctcttctcgttcctcatcacgtagtcgcaacagttcaagaaattcaactccaggcagcagtaggggaacttctcctgctagaatggctggcaatggcggtgatgctgctcttgctttgctgctgcttgacagattgaaccagcttgagagcaaaatgtctggtaaaggccaacaacaacaaggccaaactgtcactaagaaatctgctgctgaggcttctaagaagcctcggcaaaaacgtactgccactaaagcatacaatgtaacacaagctttcggcagacgtggtccagaacaaacccaaggaaattttggggaccaggaactaatcagacaaggaactgattacaaacattggccgcaaattgcacaatttgcccccagcgcttcagcgttcttcggaatgtcgcgcattggcatggaagtcacaccttcgggaacgtggttgacctacacaggtgccatcaaattggatgacaaagatccaaatttcaaagatcaagtcattttgctgaataagcatattgacgcatacaaaacattcccaccaacagagcctaaaaaggacaaaaagaagaaggctgatgaaactcaagccttaccgcagagacagaagaaacagcaaactgtgactcttcttcctgctgcagatttggatgatttctccaaacaattgcaacaatccatgagcagtgctgactcaactcaggcctaaactcatgcagaccacacaaggcagatgggctatataaacgttttcgcttttccgtttacgatatatagtctactcttgtgcagaatgaattctcgtaactacatagcacaagtagatgtagttaactttaatctcacatagcaatctttaatcagtgtgtaacattagggaggacttgaaagagccaccacattttcaccgaggc

SEQ ID NO: 46 - DNA, 29731 bp, synthetic construct
  misc_feature 1..29731: note = Reconstituted virus 9
  source 1..29731: mol_type = other DNA
gtttataccttcccaggtaacaaaccaaccaactttcgatctcttgtagatctgttctctaaacgaactttaaaatctgtgtggctgtcactcggctgcatgcttagtgcactcacgcagtataattaataactaattactgtcgttgacaggacacgagtaactcgtctatcttctgcaggctgcttacggtttcgtccgtgttgcagccgatcatcagcacatctaggttttgtccgggtgtgaccgaaaggtaagatggagagccttgtccctggtttcaacgagaaaacacacgtccaactcagtttgcctgttttacaggttcgcgacgtgctcgtacgtggctttggagactccgtggaggaggtcttatcagaggcacgtcaacatcttaaagatggcacttgtggcttagtagaagttgaaaaaggcgttttgcctcaacttgaacagccctatgtgttcatcaaacgttcggatgctcgaactgcacctcatggtcatgttatggttgagctggtagcagaactcgaaggcattcagtacggtcgtagtggtgagacacttggtgtccttgtccctcatgtgggcgaaataccagtggcttaccgcaaggttcttcttcgtaagaacggtaataaaggagctggtggccatagttacggcgccgatctaaagtcatttgacttaggcgacgagcttggcactgatccttatgaagattttcaagaaaactggaacactaaacatagcagtggtgttacccgtgaactcatgcgtgagcttaacggaggggcatacactcgctatgtcgataacaacttctgtggccctgatggctaccctcttgagtgcattaaagaccttctagcacgtgctggtaaagcttcatgcactttgtccgaacaactggactttattgacactaagaggggtgtatactgctgccgtgaacatgagcatgaaattgcttggtacacggaacgttctgaaaagagctatgaattgcagacaccttttgaaattaaattggcaaagaaatttgacaccttcaatggggaatgtccaaattttgtatttcccttaaattccataatcaagactattcaaccaagggttgaaaagaaaaagcttgatggctttatgggtagaattcgatctgtctatccagttgcgtcaccaaatgaatgcaaccaaatgtgcctttcaactctcatgaagtgtgatcattgtggtgaaacttcatggcagacgggcgattttgttaaagccacttgcgaattttgtggcactgagaatttgactaaagaaggtgccactacttgtggttacttaccccaaaatgctgttgttaaaatttattgtccagcatgtcacaattcagaagtaggacctgagcatagtcttgccgaataccataatgaatctggcttgaaaaccattcttcgtaagggtggtcgcactattgcctttggaggctgtgtgttctcttatgttggttgccataacaagtgtgcctattgggttccacgtgctagcgctaacataggttgtaaccatacaggtgttgttggagaaggttccgaaggtcttaatgacaaccttcttgaaatactccaaaaagagaaagtcaacatcaatattgttggtgactttaaacttaatgaagagatcgccattattttggcatctttttctgcttccacaagtgcttttgtggaaactgtgaaaggtttggattataaagcattcaaacaaattgttgaatcctgtggtaattttaaagttacaaaaggaaaagctaaaaaaggtgcctggaatattggtgaacagaaatcaatactgagtcctctttatgcatttgcatcagaggctgctcgtgttgtacgatcaattttctcccgcactcttgaaactgctcaaaattctgtgcgtgttttacagaaggccgctataacaatactagatggaatttcacagtattcactgagactcattgatgctatgatgttcacatctgatttggctactaacaatctagttgtaatggcctacattacaggtggtgttgttcagttgacttcgcagtggctaactaacatctttggcactgtttatgaaaaactcaaacccgtccttgattggcttgaagagaagtttaaggaaggtgtagagtttcttagagacggttgggaaattgttaaatttatctcaacctgtgcttgtgaaattgtcggtggacaaattgtcacctgtgcaaaggaaattaaggagagtgttcagacattctttaagcttgtaaataaatttttggctttgtgtgctgactctatcattattggtggagctaaacttaaagccttgaatttaggtgaaacatttgtcacgcactcaaagggattgtacagaaagtgtgttaaatccagagaagaaactggcctactcatgcctctaaaagccccaaaagaaattatcttcttagagggagaaacacttcccacagaagtgttaacagaggaagttgtcttgaaaactggtgatttacaaccattagaacaacctactagtgaagctgttgaagctccattggttggtacaccagtttgtattaacgggcttatgttgctcgaaatcaaagacacagaaaagtactgtgcccttgcacctaatatgatggtaacaaacaataccttcacactcaaaggcggtgcaccaacaaaggttacttttggtgatgacactgtgatagaagtgcaaggttacaagagtgtgaatatcacttttgaacttgatgaaaggattgataaagtacttaatgagaagtgctctgcctatacagttgaactcggtacagaagtaaatgagttcgcctgtgttgtggcagatgctgtcataaaaactttgcaaccagtatctgaattacttacaccactgggcattgatttagatgagtggagtatggctacatactacttatttgatgagtctggtgagtttaaattggcttcacatatgtattgttctttttaccctccagatgaggatgaagaagaaggtgattgtgaagaagaagagtttgagccatcaactcaatatgagtatggtactgaagatgattaccaaggtaaacctttggaatttggtgccacttctgctgctcttcaacctgaagaagagcaagaagaagattggttagatgatgatagtcaacaaactgttggtcaacaagacggcagtgaggacaatcagacaactactattcaaacaattgttgaggttcaacctcaattagagatggaacttacaccagttgttcagactattgaagtgaatagttttagtggttatttaaaacttactgacaatgtatacattaaaaatgcagacattgtggaagaagctaaaaaggtaaaaccaacagtggttgttaatgcagccaatgtttaccttaaacatggaggaggtgttgcaggagccttaaataaggctactaacaatgccatgcaagttgaatctgatgattacatagctactaatggaccacttaaagtgggtggtagttgtgttttaagcggacacaatcttgctaaacactgtcttcatgttgtcggcccaaatgttaacaaaggtgaagacattcaacttcttaagagtgcttatgaaaattttaatcagcacgaagttctacttgcaccattattatcagctggtatttttggtgctgaccctatacattctttaagagtttgtgtagatactgttcgcacaaatgtctacttagctgtctttgataaaaatctctatgacaaacttgtttcaagctttttggaaatgaagagtgaaaagcaagttgaacaaaagatcgctgagattcctaaagaggaagttaagccatttataactgaaagtaaaccttcagttgaacagagaaaacaagatgataagaaaatcaaagcttgtgttgaagaagttacaacaactctggaagaaactaagttcctcacagaaaacttgttactttatattgacattaatggcaatcttcatccagattctgccactcttgttagtgacattgacatcactttcttaaagaaagatgctccatatatagtgggtgatgttgttcaagagggtgttttaactgctgtggttatacctactaaaaaggctggtggcactactgaaatgctagcgaaagctttgagaaaagtgccaacagacaattatataaccacttacccgggtcagggtttaaatggttacactgtagaggaggcaaagacagtgcttaaaaagtgtaaaagtgccttttacattctaccatctattatctctaatgagaagcaagaaattcttggaactgtttcttggaatttgcgagaaatgcttgcacatgcagaagaaacacgcaaattaatgcctgtctgtgtggaaactaaagccatagtttcaactatacagcgtaaatataagggtattaaaatacaagagggtgtggttgattatggtgctagattttacttttacaccagtaaaacaactgtagcgtcacttatcaacacacttaacgatctaaatgaaactcttgttacaatgccacttggctatgtaacacatggcttaaatttggaagaagctgctcggtatatgagatctctcaaagtgccagctacagtttctgtttcttcacctgatgctgttacagcgtataatggttatcttacttcttcttctaaaacacctgaagaacattttattgaaaccatctcacttgctggttcctataaagattggtcctattctggacaatctacacaactaggtatagaatttcttaagagaggtgataaaagtgtatattacactagtaatcctaccacattccacctagatggtgaagttatcacctttgacaatcttaagacacttctttctttgagagaagtgaggactattaaggtgtttacaacagtagacaacattaacctccacacgcaagttgtggacatgtcaatgacatatggacaacagtttggtccaacttatttggatggagctgatgttactaaaataaaacctcataattcacatgaaggtaaaacattttatgttttacctaatgatgacactctacgtgttgaggcttttgagtactaccacacaactgatcctagttttctgggtaggtacatgtcagcattaaatcacactaaaaagtggaaatacccacaagttaatggtttaacttctattaaatgggcagataacaactgttatcttgccactgcattgttaacactccaacaaatagagttgaagtttaatccacctgctctacaagatgcttattacagagcaagggctggtgaagctgctaacttttgtgcacttatcttagcctactgtaataagacagtaggtgagttaggtgatgttagagaaacaatgagttacttgtttcaacatgccaatttagattcttgcaaaagagtcttgaacgtggtgtgtaaaacttgtggacaacagcagacaacccttaagggtgtagaagctgttatgtacatgggcacactttcttatgaacaatttaagaaaggtgttcagataccttgtacgtgtggtaaacaagctacaaaatatctagtacaacaggagtcaccttttgttatgatgtcagcaccacctgctcagtatgaacttaagcatggtacatttacttgtgctagtgagtacactggtaattaccagtgtggtcactataaacatataacttctaaagaaactttgtattgcatagacggtgctttacttacaaagtcctcagaatacaaaggtcctattacggatgttttctacaaagaaaacagttacacaacaaccataaaaccagttacttataaattggatggtgttgtttgtacagaaattgaccctaagttggacaattattataagaaagacaattnntatttcacagagcaaccaattgatcttgtaccaaaccaaccatatccaaacgcaagcttcgataattttaagtttgtatgtgataatatcaaatttgctgatgatttaaaccagttaactggttataagaaacctgcttcaagagagcttaaagttacatttttccctgacttaaatggtgatgtggtggctattgattataaacactacacaccctcttttaagaaaggagctaaattgttacataaacctattgtttggcatgttaacaatgcaactaataaagccacgtataaaccaaatacctggtgtatacgttgtctttggagcacaaaaccagttgaaacatcaaattcgtttgatgtactgaagtcagaggacgcgcagggaatggataatcttgcctgcgaagatctaaaaccagtctctgaagaagtagtggaaaatcctaccatacagaaagacgttcttgagtgtaatgtgaaaactaccgaagttgtaggagacattatacttaaaccagcaaataatagtttaaaaattacagaagaggttggccacacagatctaatggctgcttatgtagacaattctagtcttactattaagaaacctaatgaattatctagagtattaggtttgaaaacccttgctactcatggtttagctgctgttaatagtgtcccttgggatactatagctaattatgctaagccttttcttaacaaagttgttagtacaactactaacatagttacacggtgtttaaaccgtgtttgtactaattatatgccttatttctttactttattgctacaattgtgtacttttactagaagtacaaattctagaattaaagcatctatgccgactactatagcaaagaatactgttaagagtgtcggtaaattttgtctagaggcttcatttaattatttgaagtcacctaatttttctaaactgataaatattataatttggtttttactattaagtgtttgcctaggttctttaatctactcaaccgctgctttaggtgttttaatgtctaatttaggcatgccttcttactgtactggttacagagaaggctatttgaactctactaatgtcactattgcaacctactgtactggttctataccttgtagtgtttgtcttagtggtttagattctttagacacctatccttctttagaaactatacaaattaccatttcatcttttaaatgggatttaactgcttttggcttagttgcagagtggtttttggcatatattcttttcactaggtttttctatgtacttggattggctgcaatcatgcaattgtttttcagctattttgcagtacattttattagtaattcttggcttatgtggttaataattaatcttgtacaaatggccccgatttcagctatggttagaatgtacatcttctttgcatcattttattatgtatggaaaagttatgtgcatgttgtagacggttgtaattcatcaacttgtatgatgtgttacaaacgtaatagagcaacaagagtcgaatgtacaactattgttaatggtgttagaaggtccttttatgtctatgctaatggaggtaaaggcttttgcaaactacacaattggaattgtgttaattgtgatacattctgtgctggtagtacatttattagtgatgaagttgcgagagacttgtcactacagtttaaaagaccaataaatcctactgaccagtcttcttacatcgttgatagtgttacagtgaagaatggttccatccatctttactttgataaagctggtcaaaagacttatgaaagacattctctctctcattttgttaacttagacaacctgagagctaataacactaaaggttcattgcctattaatgttatagtttttgatggtaaatcaaaatgtgaagaatcatctgcaaaatcagcgtctgtttactacagtcagcttatgtgtcaacctatactgttactagatcaggcattagtgtctgatgttggtgatagtgcggaagttgcagttaaaatgtttgatgcttacgttaatacgttttcatcaacttttaacgtaccaatggaaaaactcaaaacactagttgcaactgcagaagctgaacttgcaaagaatgtgtccttagacaatgtcttatctacttttatttcagcagctcggcaagggtttgttgattcagatgtagaaactaaagatgttgttgaatgtcttaaattgtcacatcaatctgacatagaagttactggcgatagttgtaataactatatgctcacctataacaaagttgaaaacatgacaccccgtgaccttggtgcttgtattgactgtagtgcgcgtcatattaatgcgcaggtagcaaaaagtcacaacattgctttgatatggaacgttaaagatttcatgtcattgtctgaacaactacgaaaacaaatacgtagtgctgctaaaaagaataacttaccttttaagttgacatgtgcaactactagacaagttgttaatgttgtaacaacaaagatagcacttaagggtggtaaaattgttaataattggttgaagcagttaattaaagttacacttgtgttcctttttgttgctgctattttctatttaataacacctgttcatgtcatgtctaaacatactgacttttcaagtgaaatcataggatacaaggctattgatggtggtgtcactcgtgacatagcatctacagatacttgttttgctaacaaacatgctgattttgacacatggtttagccagcgtggtggtagttatactaatgacaaagcttgcccattgattgctgcagtcataacaagagaagtgggttttgtcgtgcctggtttgcctggcacgatattacgcacaactaatggtgactttttgcatttcttacctagagtttttagtgcagttggtaacatctgttacacaccatcaaaacttatagagtacactgactttgcaacatcagcttgtgttttggctgctgaatgtacaatttttaaagatgcttctggtaagccagtaccatattgttatgataccaatgtactagaaggttctgttgcttatgaaagtttacgccctgacacacgttatgtgctcatggatggctctattattcaatttcctaacacctaccttgaaggttctgttagagtggtaacaacttttgattctgagtactgtaggcacggcacttgtgaaagatcagaagctggtgtttgtgtatctactagtggtagatgggtacttaacaatgattattacagatctttaccaggagttttctgtggtgtagatgctgtaaatttacttactaatatgtttacaccactaattcaacctattggtgctttggacatatcagcatctatagtagctggtggtattgtagctatcgtagtaacatgccttgcctactattttatgaggtttagaagagcttttggtgaatacagtcatgtagttgcctttaatactttactattccttatgtcattcactgtactctgtttaacaccagtttactcattcttacctggtgtttattctgttatttacttgtacttgacattttatcttactaatgatgtttcnnttttagcacatattcagtggatggttatgttcacacctttagtacctttctggataacaattgcttatatcatttgtatttccacaaagcatttctattggttctttagtaattacctaaagagacgtgtagtctttaatggtgtttcctttagtacttttgaagaagctgcgctgtgcacctttttgttaaataaagaaatgtatctaaagttgcgtagtgatgtgctattacctcttacgcaatataatagatacttagctctttataataagtacaagtattttagtggagcaatggatacaactagctacagagaagctgcttgttgtcatctcgcaaaggctctcaatgacttcagtaactcaggttctgatgttctttaccaaccaccacaaacctctatcacctcagctgttttgcagagtggttttagaaaaatggcattcccatctggtaaagttgagggttgtatggtacaagtaacttgtggtacaactacacttaacggtctttggcttgatgacgtagtttactgtccaagacatgtgatctgcacctctgaagacatgcttaaccctaattatgaagatttactcattcgtaagtctaatcataatttcttggtacaggctggtaatgttcaactcagggttattggacattctatgcaaaattgtgtacttaagcttaaggttgatacagccaatcctaagacacctaagtataagtttgttcgcattcaaccaggacagactttttcagtgttagcttgttacaatggttcaccatctggtgtttaccaatgtgctatgaggcccaatttcactattaagggttcattccttaatggttcatgtggtagtgttggttttaacatagattatgactgtgtctctttttgttacatgcaccatatggaattaccaactggagttcatgctggcacagacttagaaggtaacttttatggaccttttgttgacaggcaaacagcacaagcagctggtacggacacaactattacagttaatgttttagcttggttgtacgctgctgttataaatggagacaggtggtttctcaatcgatttaccacaactcttaatgactttaaccttgtggctatgaagtacaattatgaacctctaacacaagaccatgttgacatactaggacctctttctgctcaaactggaattgccgttttagatatgtgtgcttcattaaaagaattactgcaaaatggtatgaatggacgtaccatattgggtagtgctttattagaagatgaatttacaccttttgatgttgttagacaatgctcaggtgttactttccaaagtgcagtgaaaagaacaatcaagggtacacaccactggttgttactcacaattttgacttcacttttagttttagtccagagtactcaatggtctttgttcttttttttgtatgaaaatgcctttttaccttttgctatgggtattattgctatgtctgcttttgcaatgatgtttgtcaaacataagcatgcatttctctgtttgtttttgttaccttctcttgccactgtagcttattttaatatggtctatatgcctgctagttgggtgatgcgtattatgacatggttggatatggttgatactagtttgtctggttttaagctaaaagactgtgttatgtatgcatcagctgtagtgttactaatccttatgacagcaagaactgtgtatgatgatggtgctaggagagtgtggacacttatgaatgtcttgacactcgtttataaagtttattatggtaatgctttagatcaagccatttccatgtgggctcttataatctctgttacttctaactactcaggtgtagttacaactgtcatgtttttggccagaggtattgtttttatgtgtgttgagtattgccctattttcttcataactggtaatacacttcagtgtataatgctagtttattgtttcttaggctatttttgtacttgttactttggcctcttttgtttactcaaccgctactttagactgactcttggtgtttatgattacttagtttctacacaggagtttagatatatgaattcacagggactactcccacccaagaatagcatagatgccttcaaactcaacattaaattgttgggtgttggtggcaaaccttgtatcaaagtagccactgtacagtctaaaatgtcagatgtaaagtgcacatcagtagtcttactctcagttttgcaacaactcagagtagaatcatcatctaaattgtgggctcaatgtgtccagttacacaatgacattctcttagctaaagatactactgaagcctttgaaaaaatggtttcactactttctgttttgctttccatgcagggtgctgtagacataaacaagctttgtgaagaaatgctggacaacagggcaaccttacaagctatagcctcagagtttagttcccttccatcatatgcagcttttgctactgctcaagaagcttatgagcaggctgttgctaatggtgattctgaagttgttcttaaaaagttgaagaagtctttgaatgtggctaaatctgaatttgaccgtgatgcagccatgcaacgtaagttggaaaagatggctgatcaagctatgacccaaatgtataaacaggctagatctgaggacaagagggcaaaagttactagtgctatgcagacaatgcttttcactatgcttagaaagttggataatgatgcactcaacaacattatcaacaatgcaagagatggttgtgttcccttgaacataatacctcttacaacagcagccaaactaatggttgtcataccagactataacacatataaaaatacgtgtgatggtacaacatttacttatgcatcagcattgtgggaaatccaacaggttgtagatgcagatagtaaaattgttcaacttagtgaaattagtatggacaattcacctaatttagcatggcctcttattgtaacagctttaagggccaattctgctgtcaaattacagaataatgagcttagtcctgttgcactacgacagatgtcttgtgctgccggtactacacaaactgcttgcactgatgacaatgcgttagcttactacaacacaacaaagggaggtaggtttgtacttgcactgttatccgatttacaggatttgaaatgggctagattccctaagagtgatggaactggtactatctatacagaactggaaccaccttgtaggtttgttacagacacacctaaaggtcctaaagtgaagtatttatactttattaaaggattaaacaacctaaatagaggtatggtacttggtagtttagctgccacagtacgtctacaagctggtaatgcaacagaagtgcctgccaattcaactgtattatctttctgtgcttttgctgtagatgctgctaaagcttacaaagattatctagctagtgggggacaaccaatcactaattgtgttaagatgttgtgtacacacactggtactggtcaggcaataacagttacaccggaagccaatatggatcaagaatcctttggtggtgcatcgtgttgtctgtactgccgttgccacatagatcatccaaatcctaaaggattttgtgacttaaaaggtaagtatgtacaaatacctacaacttgtgctaatgaccctgtgggttttacacttaaaaacacagtctgtaccgtctgcggtatgtggaaaggttatggctgtagttgtgatcaactccgcgaacccatgcttcagtcagctgatgcacaatcgtttttaaacgggtttgcggtgtaagtgcagcccgtcttacaccgtgcggcacaggcactagtactgatgtcgtatacagggcttttgacatctacaatgataaagtagctggttttgctaaattcctaaaaactaattgttgtcgcttccaagaaaaggacgaagatgacaatttaattgattcttactttgtagttaagagacacactttctctaactaccaacatgaagaaacaatttataatttacttaaggattgtccagctgttgctaaacatgacttctttaagtttagaatagacggtgacatggtaccacatatatcacgtcaacgtcttactaaatacacaatggcagacctcgtctatgctttaaggcattttgatgaaggtaattgtgacacattaaaagaaatacttgtcacatacaattgttgtgatgatgattatttcaataaaaaggactggtatgattttgtagaaaacccagatatattacgcgtatacgccaacttaggtgaacgtgtacgccaagctttgttaaaaacagtacaattctgtgatgccatgcgaaatgctggtattgttggtgtactgacattagataatcaagatctcaatggtaactggtatgatttcggtgatttcatacaaaccacgccaggtagtggagttcctgttgtagattcttattattcattgttaatgcctatattaaccttgaccagggctttaactgcagagtcacatgttgacactgacttaacaaagccttacattaagtgggatttgttaaaatatgacttcacggaagagaggttaaaactctttgaccgttattttaaatattgggatcagacataccacccaaattgtgttaactgtttggatgacagatgcattctgcattgtgcaaactttaatgttttattctctacagtgttcccacttacaagttttggaccactagtgagaaaaatatttgttgatggtgttccatttgtagtttcaactggataccacttcagagagctaggtgttgtacataatcaggatgtaaatttacatagctctagacttagttttaaggaattacttgtgtatgctgctgaccctgctatgcacgctgcttctggtaatctattactagataaacgcactacgtgcttttcagtagctgcacttactaacaatgttgcttttcaaactgtcaaacccggtaattttaacaaagacttctatgactttgctgtgtctaagggtttctttaaggaaggaagttctgttgaattaaaacacttcttctttgctcaggatggtaatgctgctatcagcgattatgactactatcgttataatctaccaacaatgtgtgatatcagacaactactatttgtagttgaagttgttgataagtactttgattgttacgatggtggctgtattaatgctaaccaagtcatcgtcaacaacctagacaaatcagctggttttccatttaataaatggggtaaggctagactttattatgattcaatgagttatgaggatcaagatgcacttttcgcatatacaaaacgtaatgtcatccctactataactcaaatgaatcttaagtatgccattagtgcaaagaatagagctcgcaccgtagctggtgtctctatctgtagtactatgaccaatagacagtttcatcaaaaattattgaaatcaatagccgccactagaggagctactgtagtaattggaacaagcaaattctatggtggttggcacaacatgttaaaaactgtttatagtgatgtagaaaaccctcaccttatgggttgggattatcctaaatgtgatagagccatgcctaayatgcttagaattatggcctcacttgttcttgctcgcaaacatacaacgtgttgtagcttgtcacaccgtttctatagattagctaatgagtgtgctcaagtattgagtgaaatggtcatgtgtggcggttcactatatgttaaaccaggtggaacctcatcaggagatgccacaactgcttatgctaatagtgtttttaacatttgtcaagctgtcacggccaatgttaatgcacttttatctactgatggtaacaaaattgccgataagtatgtccgcaatttacaacacagactttatgagtgtctctatagaaatagagatgttgacacagactttgtgaatgagttttacgcatatttgcgtaaacatttctcaatgatgatactctctgacgatgctgttgtgtgtttcaatagcacttatgcatctcaaggtctagtggctagcataaagaactttaagtcagttctttattatcaaaacaatgtttttatgtctgaagcaaaatgttggactgagactgaccttactaaaggacctcatgaattttgctctcaacatacaatgctagttaaacagggtgatgattatgtgtaccttccttacccagatccatcaagaatcctaggggccggctgttttgtagatgatatcgtaaaaacagatggtacacttatgattgaacggttcgtgtctttagctatagatgcttacccacttactaaacatcctaatcaggagtatgctgatgtctttcatttgtacttacaatacataagaaagctacatgatgagttaacaggacacatgttagacatgtattctgttatgcttactaatgataacacttcaaggtattgggaacctgagttttatgaggctatgtacacaccgcatacagtcttacaggctgttggggcttgtgttctttgcaattcacagacttcattaagatgtggtgcttgcatacgtagaccattcttatgttgtaaatgctgttacgaccatgtcatatcaacatcacataaattagtcttgtctgttaatccgtatgtttgcaatgctccaggttgtgatgtcacagatgtgactcaactttacttaggaggtatgagctattattgtaaatcacataaaccacccattagttttccattgtgtgctaatggacaagtttttggtttatataaaaatacatgtgttggtagcgataatgttactgactttaatgcaattgcaacatgtgactggacaaatgctggtgattacattttagctaacacctgtactgaaagactcaagctttttgcagcagaaacgctcaaagctactgaggagacatttaaactgtcttatggtattgctactgtacgtgaagtgctgtctgacagagaattacatctttcatgggaagttggtaaacctagaccaccacttaaccgaaattatgtctttactggttatcgtgtaactaaaaacagtaaagtacaaataggagagtacacctttgaaaaaggtgactatggtgatgctgttgtttaccgaggtacaacaacttacaaattaaatgttggtgattattttgtgctgacatcacatacagtaatgccattaagtgcacctacactagtgccacaagagcactatgttagaattactggcttatacccaacactcaatatctcagatgagttttctagcaatgttgcaaattatcaaaaggttggtatgcaaaagtattctacactccagggaccacctggtactggtaagagtcattttgctattggcctagctctctactacccttctgctcgcatagtgtatacagcttgctctcatgccgctgttgatgcactatgtgagaaggcattaaaatatttgcctatagataaatgtagtagaattatacctgcacgtgctcgtgtagagtgttttgataaattcaaagtgaattcaacattagaacagtatgtcttttgtactgtaaatgcattgcctgagacgacagcagatatagttgtctttgatgaaatttcaatggccacaaattatgatttgagtgttgtcaatgccagattacgtgctaagcactatgtgtacattggcgaccctgctcaattacctgcaccacgcacattgctaactaagggcacactagaaccagaatatttcaattcagtgtgtagacttatgaaaactataggtccagacatgttcctcggaacttgtcggcgttgtcctgctgaaattgttgacactgtgagtgctttggtttatgataataagcttaaagcacataaagacaaatcagctcaatgctttaaaatgttttataagggtgttatcacgcatgatgtttcatctgcaattaacaggccacaaataggcgtggtaagagaattccttacacgtaaccctgcttggagaaaagctgtctttatttcaccttataattcacagaatgctgtagcctcaaagattttgggactaccaactcaaactgttgattcatcacagggctcagaatatgactatgtcatattcactcaaaccactgaaacagctcactcttgtaatgtaaacagatttaatgttgctattaccagagcaaaagtaggcatactttgcataatgtctgatagagacctttatgacaagttgcaatttacaagtcttgaaattccacgtaggaatgtggcaactttacaagctgaaaatgtaacaggactctttaaagattgtagtaaggtaatcactgggttacatcctacacaggcacctacacacctcagtgttgacactaaattcaaaactgaaggtttatgtgttgacatacctggcatacctaaggacatgacctatagaagactcatctctatgatgggttttaaaatgaattatcaagttaatggttaccctaacatgtttatcacccgcgaagaagctataagacatgtacgtgcatggattggcttcgatgtcgaggggtgtcatgctactagagaagctgttggtaccaatttacctttacagctaggtttttctacaggtgttaacctagttgctgtacctacaggttatgttgatacacctaataatacagatttttccagagttagtgctaaaccaccgcctggagatcaatttaaacacctcataccacttatgtacaaaggacttccttggaatgtagtgcgtataaagattgtacaaatgttaagtgacacacttaaaaatctctctgacagagtcgtatttgtcttatgggcacatggctttgagttgacatctatgaagtattttgtgaaaataggacctgagcgcacctgttgtctatgtgatagacgtgccacatgcttttccactgcttcagacacttatgcctgttggcatcattctattggatttgattacgtctataatccgtttatgattgatgttcaacaatggggttttacaggtaacctacaaagcaaccatgatctgtattgtcaagtccatggtaatgcacatgtagctagttgtgatgcaatcatgactaggtgtctagctgtccacgagtgctttgttaagcgtgttgactggactattgaatatcctataattggtgatgaactgaagattaatgcggcttgtagaaaggttcaacacatggttgttaaagctgcattattagcagacaaattcccagttcttcacgacattggtaaccctaaagctattaagtgtgtacctcaagctgatgtagaatggaagttctatgatgcacagccttgtagtgacaaagcttataaaatagaagaattattctattcttatgccacacattctgacaaattcacagatggtgtatgcctattttggaattgcaatgtcgatagatatcctgctaattccattgtttgtagatttgacactagagtgctatctaaccttaacttgcctggttgtgatggtggcagtttgtatgtaaataaacatgcattccacacaccagcttttgataaaagtgcttttgttaatttaaaacaattaccatttttctattactctgacagtccatgtgagtctcatggaaaacaagtagtgtcagatatagattatgtaccactaaagtctgctacgtgtataacacgttgcaatttaggtggtgctgtctgtagacatcatgctaatgagtacagattgtatctcgatgcttataacatgatgatctcagctggctttagcttgtgggtttacaaacaatttgatacttataacctctggaacacttttacaagacttcagagtttagaaaatgtggcttttaatgttgtaaataagggacactttgatggacaacagggtgaagtaccagtttctatcattaataacactgtttacacaaaagttgatggtgttgatgtagaattgtttgaaaataaaacaacattacctgttaatgtagcatttgagctttgggctaagcgcaacattaaaccagtaccagaggtgaaaatactcaataatttgggtgtggacattgctgctaatactgtgatctgggactacaaaagagatgctccagcacatatatctactattggtgtttgttctatgactgacatagccaagaaaccaactgaaacgatttgtgcaccactcactgtcttttttgatggtagagttgatggtcaagtagacttatttagaaatgcccgtaatggtgttcttattacagaaggtagtgttaaaggtttacaaccatctgtaggtcccaaacaagctagtcttaatggagtcacattaattggagaagccgtaaaaacacagttcaattattataagaaagttgatggtgttgtccaacaattacctgaaacttactttactcagagtagaaatttacaagaatttaaacccaggagtcaaatggaaattgatttcttagaattagctatggatgaattcattgaacggtataaattagaaggctatgccttcgaacatatcgtttatggagattttagtcatagtcagttaggtggtttacatctactgattggactagctaaacgttttaaggaatcaccttttgaattagaagattttattcctatggacagtacagttaaaaactatttcataacagatgcgcaaacaggttcatctaagtgtgtgtgttctgttattgatttattacttgatgattnngttgaaataataaaatcccaagatttatctgtagtttctaaggttgtcaaagtgactattgactatacagaaatttcatttatgctttggtgtaaagatggccatgtagaaacattttacccaaaattacaatctagtcaagcgtggcaaccgggtgttgctatgcctaatctttacaaaatgcaaagaatgctattagaaaagtgtgaccttcaaaattatggtgatagtgcaacattacctaaaggcataatgatgaatgtcgcaaaatatactcaactgtgtcaatatttaaacacattaacattagctgtaccctataatatgagagttatacattttggtgctggttctgataaaggagttgcaccaggtacagctgttttaagacagtggttgcctacgggtacgctgcttgtcgactcagatcttaatgactttgtctctgatgcagattcaactttgattggtgattgkgcaactgtacatacagctaataaatgggatctcattattagtgatatgtacgaccctaagactaaaaatgttacaaaagaaaatgactctaaagagggttttttcacttacatttgtgggtttatacaacaaaagctagctcttggaggttccgtggctataaagataacagaacattcttggaatgctgatctttataagctcatgggacacttcgcatggtggacagcctttgttactaatgtgaatgcgtcatcatctgaagcatttttaattggatgtaattatcttggcaaaccacgcgaacaaatagatggttatgtcatgcatgcaaattacatattttggaggaatacaaatccaattcagttgtcttcctattctttatttgacatgagtaaatttccccttaaattaaggggtactgctgttatgtctttaaaagaaggtcaaatcaatgatatgattttatctcttcttagtaaaggtagacttataattagagaaaacaacagagttgttatttctagtgatgttcttgttaacaactaaacgaacaatgtttgtttttcttgttttattgccactagtctctagtcagtgtgttaatcttacaamcagaactcaattacccyctgcatacactaattctttcacacgtggtgtttattaccctgacaaagttttcagatcctcagttttacattcaactcaggacttgttcttacctttcttttccaatgttacttggttccatgctatacatgtctctgggaccaatggtactaagaggtttgataaccctgtcctaccatttaatgatggtgtttattttgcttccactgagaagtctaacataataagaggctggatttttggtactactttagattcgaagacccagtccctacttattgttaataacgctactaatgttgttattaaagtctgtgaatttcaattttgtaatgatccatttttgggtgtttattaccacaaaaacaacaaaagttggatggaaagtgagttcagagtttattctagtgcgaataattgcacttttgaatatgtctctcagccttttcttatggaccttgaaggaaaacagggtaatttcaaaaatcttagggaatttgtgtttaagaatattgatggttattttaaaatatattctaagcacacgcctattaatttagtgcgtgatctccctcagggtttttcggctttagaaccattggtagatttgccaataggtattaacatcactaggtttcaaactttacttgctttacatagaagttatttgactcctggtgattcttcttcaggttggacagctggtgctgcagcttattatgtgggttatcttcaacctaggacttttctattaaaatataatgaaaatggaaccattacagatgctgtagactgtgcacttgaccctctctcagaaacaaagtgtacgttgaaatccttcactgtagaaaaaggaatctatcaaacttctaactttagagtccaaccaacagaatctattgttagatttcctaatattacaaacttgtgcccttttggtgaagtttttaacgccaccagatttgcatctgtttatgcttggaacaggaagagaatcagcaactgtgttgctgattattctgtcctatataattccgcatcattttccacttttaagtgttatggagtgtctcctactaaattaaatgatctctgctttactaatgtctatgcagattcatttgtaattagaggtgatgaagtcagacaaatcgctccagggcaaactggaaagattgctgattataattataaattaccagatgattttacaggctgcgttatagcttggaattctaacaatcttgattctaaggttggtggtaattataattacctgtatagattgtttaggaagtctaatctcaaaccttttgagagagatatttcaactgaaatctatcaggccggtagcacaccttgtaatggtgttgaaggttttaattgttactttcctttacaatcatatggtttccaacccactaatggtgttggttaccaaccatacagagtagtagtactttcttttgaacttctacatgcaccagcaactgtttgtggacctaaaaagtctactaatttggttaaaaacaaatgtgtcaatttcaacttcaatggtttaacaggcacaggtgttcttactgagtctaacaaaaagtttctgcctttccaacaatttggcagagacattgctgacactactgatgctgtccgtgatccacagacacttgagattcttgacattacaccatgttcttttggtggtgtcagtgttataacaccaggaacaaatacttctaaccaggttgctgttctttatcagggtgttaactgcacagaagtccctgttgctattcatgcagatcaacttactcctacttggcgtgtttattctacaggttctaatgtttttcaaacacgtgcaggctgtttaataggggctgaacatgtcaacaactcatatgagtgtgacatacccattggtgcaggtatatgcgctagttatcagactcagactaattctcctcggcgggcacgtagtgtagctagtcaatccatcattgcctacactatgtcacttggtgcagaaaattcagttgcttactctaataactctattgccatacccacaaattttactattagtgttaccacagaaattctaccagtgtctatgaccaagacatcagtagattgtacaatgtacatttgtggtgattcaactgaatgcagcaatcttttgttgcaatatggcagtttttgtacacaattaaaccgtgctttaactggaatagctgttgaacaagacaaaaacacccaagaagtttttgcacaagtcaaacaaatttacaaaacaccaccaattaaagattttggtggttttaatttttcacaaatattaccagatccatcaaaaccaagcaagaggtcatttattgaagatctacttttcaacaaagtgacacttgcagatgctggcttcatcaaacaatatggtgattgccttggtgatattgctgctagagacctcatttgtgcacaaaagtttaacggccttactgttttgccacctttgctcacagatgaaatgattgctcaatacacttctgcactgttagcgggtacaatcacttctggttggacctttggtgcaggtgctgcattacaaataccatttgctatgcaaatggcttataggtttaatggtattggagttacacagaatgttctctatgagaaccaaaaattgattgccaaccaatttaatagtgctattggcaaaattcaagactcactttcttccacagcaagtgcacttggaaaacttcaagatgtggtcaaccaaaatgcacaagctttaaacacgcttgttaaacaacttagctccaattttggtgcaatttcaagtgttttaaatgatatcctttcacgtcttgacaaagttgaggctgaagtgcaaattgataggttgatcacaggcagacttcaaagtttgcagacatatgtgactcaacaattaattagagctgcagaaatcagagcttctgctaatcttgctgctactaaaatgtcagagtgtgtacttggacaatcaaaaagagttgatttttgtggaaagggctatcatcttatgtccttccctcagtcagcacctcatggtgtagtcttcttgcatgtgacttatgtccctgcacaagaaaagaacttcacaactgctcctgccatttgtcatgatggaaaagcacactttcctcgtgaaggtgtctttgtttcaaatggcacacactggtttgtaacacaaaggaatttttatgaaccacaaatcattactacagacaacacatttgtgtctggtaactgtgatgttgtaataggaattgtcaacaacacagtttatgatcctttgcaacctgaattagactcattcaaggaggagttagataaatattttaagaatcatacatcaccagatgttgatttaggtgacatctctggcattaatgcttcagttgtaaacattcaaaaagaaattgaccgcctcaatgaggttgccaagaatttaaatgaatctctcatcgatctccaagaacttggaaagtatgagcagtatataaaatggccatggtacatttggctaggttttatagctggcttgattgccatagtaatggtgacaattatgctttgctgtatgaccagttgctgtagttgtctcaagggctgttgttcttgtggatcctgctgcaaatttgatgaagacgactctgagccagtgctcaaaggagtcaaattacattacacataaacgaacttatggatttgtttatgagaatcttcacaattggaactgtaactttgaagcaaggtgaaatcaaggatgctactccttcagattttgttcgcgctactgcaacgataccgatacaagcctcactccctttcggatggcttattgttggcgttgcacttcttgctgtttttcagagcgcttccaaaatcataaccctcaaaaagagatggcaactagcactctccaagggtgttcactttgtttgcaacttgctgttgttgtttgtaacagtttactcacaccttttgctcgttgctgctggccttgaagccccttttctctatctttatgctttagtctacttcttgcagagtataaactttgtaagaataataatgmggctttggctttgctggaaatgccgttccaaaaacccattactttatgatgccaactattttctttgctggcatactaattgttacgactattgtataccttacaatagtgtaacttcttcaattgtcattacttcaggtgatggcacaacaagtcctatttctgaacatgactaccagattggtggttatactgaaaaatgggaatctggagtaaaagactgtgttgtattacacagttacttcacttcagactattaccagctgtactcaactcaattgagtacagacactggtgttgaacatgttaccttcttcatctacaataaaattgttgatgagcctgaagaacatgtccaaattcacacaatcgacggttcatccggagttgttaatccagtaatggaaccaatttatgatgaaccgacgacgactactagcgtgcctttgtaagcacaagctgatgagtacgaacttatgtactcattcgtttcggaagagacaggtacgttaatagttaatagcgtacttctttttcttgctttcgtggtattcttgctagttacactagccatccttactgcgcttcgattgtgtgcgtactgctgcaatattgttaacgtgagtcttgtaaaaccttctttttacgtttactctcgtgttaaaaatctgaattcttctagagttcctgatcttccggtctaaacgaactaaatattatattagtttttctgtttggaactttaattttagccatggcagattccaacggtactattaccgttgaagagcttaaaaagctccttgaacaatggaacctagtaataggtttcctattccttacatggatttgtcttctacaatttgcctatgccaacaggaataggtttttgtatataattaagttaattttcctctggctgttatggccagtaactttagcttgttttgtgcttgctgctgtttacagaataaattggatcaccggtggaattgctatcgcaatggcttgtcttgtaggcttgatgtggctcagctacttcattgcttctttcagactgtttgcgcgtacgcgttccatgtggtcattcaatccagaaactaacattcttctcaacgtgccactccatggcactattctgaccagaccgcttctagaaagtgaactcgtaatcggagctgtgatccttcgtggacatcttcgtattgctggacaccatctaggacgctgtgacatcaaggacctgcctaaagaaatcactgttgctacatcacgaacgctttcttattacaaattgggagcttcgcagcgtgtagcaggtgactcaggttttgctgcatacagtcgctacaggattggcaactataaattaaacacagaccattccagtagcagtgacaatattgctttgcttgtacagtaagtgacaacagatgtttcatctcgttgactttcaggttactatagcagagatattactaattattatgaggacttttaaagtttccatttggaatcttgattacatcataaacctcataattaaaaatttatctaagtcactaactgagaataaatattctcaattagatgaagagcaaccaatggagattgattaaacgaacatgaaaattattcttttcttggcactgataacactcgctacttgtgagctttatcactaccaagagtgtgttagaggtacaacagtacttttaaaagaaccttgctcttctggaacatacgagggcaattcaccatttcatcctctagctgataacaaatttgcactgacttgctttagcactcaatttgcttttgcttgtcctgacggcgtaaaacacgtctatcagttacgtgccagatcagtttcacctaaactgttcatcagacaagaggaagttcaagaactttactctccaatttttcttattgttgcggcaatagtgtttataacactttgcttcacactcaaaagaaagacagaatgattgaactttcattaattgacttctatttgtgctttttagcctttctgctattccttgttttaattatgcttattatcttttggttctcacttgaactgcaagatcataatgaaacttgtcacgcctaaacgaacatgaaatttcttgttttcttaggaatcatcacaactgtagctgcatttcaccaagaatgtagtttacagtcatgtactcaacatcaaccatatgtagttgatgacccgtgtcctattcacttctattctaaatggtatattagagtaggagctagaaaatcagcacctttaattgaattgtgcgtggatgaggctggttctaaatcacccattcagtacatcgatatcggtaattatacagtttcctgtttaccttttacaattaattgccaggaacctaaattgggtagtcttgtagtgcgttgttcgttctatgaagactttttagagtatcatgacgttcgtgttgttttagatttcatctaaacgaacaaactaaaatgtctgataatggaccccaaaatcagcgaaatgcaccccgcattacgtttggtggaccctcagattcaactggcagtaaccagaatggagaacgcagtggggcgcgatcaaaacaacgtcggccccaaggtttacccaataatactgcgtcttggttcaccgctctcactcaacatggcaaggaagaccttaaattccctcgaggacaaggcgttccaattaacaccaatagcagtccagatgaccaaattggctactaccgaagmgctaccagacgaattcgtggtggtgacggtaaaatgaaagatctcagtccaagatggtatttctactacctaggaactgggccagaagctggacttccctatggtgctaacaaagacggcatcatatgggttgcaactgagggagccttgaatacaccaaaagatcacattggcacccgcaatcctgctaacaatgctgcaatcgtgctacaacttcctcaaggaacaacattgccaaaaggcttctacgcagaagggagcagaggcggcagtcaagcctcttctcgttcctcatcacgtagtcgcaacagttcaagaaattcaactccaggcagcagtaggggaacttctcctgctagaatggctggcaatggcggtgatgctgctcttgctttgctgctgcttgacagattgaaccagcttgagmgcaaaatgtctggtaaaggccaacaacaacaaggccaaactgtcactaagaaatctgctgctgaggcttctaagaagcctcggcaaaaacgtactgccactaaagcatacaatgtaacacaagctttcggcagacgtggtccagaacaaacccaaggaaattttggggaccaggaactaatcagacaaggaactgattacaaacattggccgcaaattgcacaatttgcccccagcgcttcagcgttcttcggaatgtcgcgcattggcatggaagtcacaccttcgggaacgtggttgacctacacaggtgccatcaaattggatgacaaagatccaaatttcaaagatcaagtcattttgctgaataagcatattgacgcatacaaaacattcccaccaacagagcctaaaaaggacaaaaagaagaaggctgatgaaactcaagccttaccgcagagacagaagaaacagcaaactgtgactcttcttcctgctgcagatttggatgatttctccaaacaattgcaacaatccatgagcagtgctgactcaactcaggcctaaactcatgcagaccacacaaggcagatgggctatataaacgttttcgcttttccgtttacgatatatagtctactcttgtgcagaatgaattctcgtaactacatagcacaagtagatgtagttaactttaatctcacatagcaatctttaatcagtgtgtaacattagggaggacttgaaagagccaccacattttcaccgaggc

SEQ ID NO: 47 - DNA, 29704 bp, synthetic construct
  misc_feature 1..29704: note = Reconstituted virus 10
  source 1..29704: mol_type = other DNA
ttataccttcccaggtaacaaaccaaccaactttcgatctcttgtagatctgttctctaaacgaactttaaaatctgtgtggctgtcactcggctgcatgcttagtgcactcacgcagtataattaataactaattactgtcgttgacaggacacgagtaactcgtctatcttctgcaggctgcttacggtttcgtccgtgttgcagccgatcatcagcacatctaggttttgtccgggtgtgaccgaaaggtaagatggagagccttgtccctggtttcaacgagaaaacacacgtccaactcagtttgcctgttttacaggttcgcgacgtgctcgtacgtggctttggagactccgtggaggaggtcttatcagaggcacgtcaacatcttaaagatggcacttgtggcttagtagaagttgaaaaaggcgttttgcctcaacttgaacagccctatgtgttcatcaaacgttcggatgctcgaactgcacctcatggtcatgttatggttgagctggtagcagaactcgaaggcattcagtacggtcgtagtggtgagacacttggtgtccttgtccctcatgtgggcgaaataccagtggcttaccgcaaggttcttcttcgtaagaacggtaataaaggagctggtggccatagttacggcgccgatctaaagtcatttgacttaggcgacgagcttggcactgatccttatgaagattttcaagaaaactggaacactaaacatagcagtggtgttacccgtgaactcatgcgtgagcttaacggaggggcatacactcgctatgtcgataacaacttctgtggccctgatggctaccctcttgagtgcattaaagaccttctagcacgtgctggtaaagcttcatgcactttgtccgaacaactggactttattgacactaagaggggtgtatactgctgccgtgaacatgagcatgaaattgcttggtacacggaacgttctgaaaagagctatgaattgcagacaccttttgaaattaaattggcaaagaaatttgacaccttcaatggggaatgtccaaattttgtatttcccttaaattccataatcaagactattcaaccaagggttgaaaagaaaaagcttgatggctttatgggtagaattcgatctgtctatccagttgcgtcaccaaatgaatgcaaccaaatgtgcctttcaactctcatgaagtgtgatcattgtggtgaaacttcatggcagacgggcgattttgttaaagccacttgcgaattttgtggcactgagaatttgactaaagaaggtgccactacttgtggttacttaccccaaaatgctgttgttaaaatttattgtccagcatgtcacaattcagaagtaggacctgagcatagtcttgccgaataccataatgaatctggcttgaaaaccattcttcgtaagggtggtcgcactattgcctttggaggctgtgtgttctcttatgttggttgccataacaagtgtgcctattgggttccacgtgctagcgctaacataggttgtaaccatacaggtgttgttggagaaggttccgaaggtcttaatgacaaccttcttgaaatactccaaaaagagaaagtcaacatcaatattgttggtgactttaaacttaatgaagagatcgccattattttggcatctttttctgcttccacaagtgcttttgtggaaactgtgaaaggtttggattataaagcattcaaacaaattgttgaatcctgtggtaattttaaagttacaaaaggaaaagctaaaaaaggtgcctggaatattggtgaacagaaatcaatactgagtcctctttatgcatttgcatcagaggctgctcgtgttgtacgatcaattttctcccgcactcttgaaactgctcaaaattctgtgcgtgttttacagaaggccgctataacaatactagatggaatttcacagtattcactgagactcattgatgctatgatgttcacatctgatttggctactaacaatctagttgtaatggcctacattacaggtggtgttgttcagttgacttcgcagtggctaactaacatctttggcactgtttatgaaaaactcaaacccgtccttgattggcttgaagagaagtttaaggaaggtgtagagtttcttagagacggttgggaaattgttaaatttatctcaacctgtgcttgtgaaattgtcggtggacaaattgtcacctgtgcaaaggaaattaaggagagtgttcagacattctttaagcttgtaaataaatttttggctttgtgtgctgactctatcattattggtggagctaaacttaaagccttgaatttaggtgaaacatttgtcacgcactcaaagggattgtacagaaagtgtgttaaatccagagaagaaactggcctactcatgcctctaaaagccccaaaagaaattatcttcttagagggagaaacacttcccacagaagtgttaacagaggaagttgtcttgaaaactggtgatttacaaccattagaacaacctactagtgaagctgttgaagctccattggttggtacaccagtttgtattaacgggcttatgttgctcgaaatcaaagacacagaaaagtactgtgcccttgcacctaatatgatggtaacaaacaataccttcacactcaaaggcggtgcaccaacaaaggttacttttggtgatgacactgtgatagaagtgcaaggttacaagagtgtgaatatcacttttgaacttgatgaaaggattgataaagtacttaatgagaagtgctctgcctatacagttgaactcggtacagaagtaaatgagttcgcctgtgttgtggcagatgctgtcataaaaactttgcaaccagtatctgaattacttacaccactgggcattgatttagatgagtggagtatggctacatactacttatttgatgagtctggtgagtttaaattggcttcacatatgtattgttctttttaccctccagatgaggatgaagaagaaggtgattgtgaagaagaagagtttgagccatcaactcaatatgagtatggtactgaagatgattaccaaggtaaacctttggaatttggtgccacttctgctgctcttcaacctgaagaagagcaagaagaagattggttagatgatgatagtcaacaaactgttggtcaacaagacggcagtgaggacaatcagacaactactattcaaacaattgttgaggttcaacctcaattagagatggaacttacaccagttgttcagactattgaagtgaatagttttagtggttatttaaaacttactgacaatgtatacattaaaaatgcagacattgtggaagaagctaaaaaggtaaaaccaacagtggttgttaatgcagccaatgtttaccttaaacatggaggaggtgttgcaggagccttaaataaggctactaacaatgccatgcaagttgaatctgatgattacatagctactaatggaccacttaaagtgggtggtagttgtgttttaagcggacacaatcttgctaaacactgtcttcatgttgtcggcccaaatgttaacaaaggtgaagacattcaacttcttaagagtgcttatgaaaattttaatcagcacgaagttctacttgcaccattattatcagctggtatttttggtgctgaccctatacattctttaagagtttgtgtagatactgttcgcacaaatgtctacttagctgtctttgataaaaatctctatgacaaacttgtttcaagctttttggaaatgaagagtgaaaagcaagttgaacaaaagatcgctgagattcctaaagaggaagttaagccatttataactgaaagtaaaccttcagttgaacagagaaaacaagatgataagaaaatcaaagcttgtgttgaagaagttacaacaactctggaagaaactaagttcctcacagaaaacttgttactttatattgacattaatggcaatcttcatccagattctgccactcttgttagtgacattgacatcactttcttaaagaaagatgctccatatatagtgggtgatgttgttcaagagggtgttttaactgctgtggttatacctactaaaaaggctggtggcactactgaaatgctagcgaaagctttgagaaaagtgccaacagacaattatataaccacttacccgggtcagggtttaaatggttacactgtagaggaggcaaagacagtgcttaaaaagtgtaaaagtgccttttacattctaccatctattatctctaatgagaagcaagaaattcttggaactgtttcttggaatttgcgagaaatgcttgcacatgcagaagaaacacgcaaattaatgcctgtctgtgtggaaactaaagccatagtttcaactatacagcgtaaatataagggtattaaaatacaagagggtgtggttgattatggtgctagattttacttttacaccagtaaaacaactgtagcgtcacttatcaacacacttaacgatctaaatgaaactcttgttacaatgccacttggctatgtaacacatggcttaaatttggaagaagctgctcggtatatgagatctctcaaagtgccagctacagtttctgtttcttcacctgatgctgttacagcgtataatggttatcttacttcttcttctaaaacacctgaagaacattttattgaaaccatctcacttgctggttcctataaagattggtcctattctggacaatctacacaactaggtatagaatttcttaagagaggtgataaaagtgtatattacactagtaatcctaccacattccacctagatggtgaagttatcacctttgacaatcttaagacacttctttctttgagagaagtgaggactattaaggtgtttacaacagtagacaacattaacctccacacgcaagttgtggacatgtcaatgacatatggacaacagtttggtccaacttatttggatggagctgatgttactaaaataaaacctcataattcacatgaaggtaaaacattttatgttttacctaatgatgacactctacgtgttgaggcttttgagtactaccacacaactgatcctagttttctgggtaggtacatgtcagcattaaatcacactaaaaagtggaaatacccacaagttaatggtttaacttctattaaatgggcagataacaactgttatcttgccactgcattgttaacactccaacaaatagagttgaagtttaatccacctgctctacaagatgcttattacagagcaagggctggtgaagctgctaacttttgtgcacttatcttagcctactgtaataagacagtaggtgagttaggtgatgttagagaaacaatgagttacttgtttcaacatgccaatttagattcttgcaaaagagtcttgaacgtggtgtgtaaaacttgtggacaacagcagacaacccttaagggtgtagaagctgttatgtacatgggcacactttcttatgaacaatttaagaaaggtgttcagataccttgtacgtgtggtaaacaagctacaaaatatctagtacaacaggagtcaccttttgttatgatgtcagcaccacctgctcagtatgaacttaagcatggtacatttacttgtgctagtgagtacactggtaattaccagtgtggtcactataaacatataacttctaaagaaactttgtattgcatagacggtgctttacttacaaagtcctcagaatacaaaggtcctattacggatgttttctacaaagaaaacagttacacaacaaccataaaaccagttacttataaattggatggtgttgtttgtacagaaattgaccctaagttggacaattattataagaaagacaattcttatttcacagagcaaccaattgatcttgtaccaaaccaaccatatccaaacgcaagcttcgataattttaagtttgtatgtgataatatcaaatttgctgatgatttaaaccagttaactggttataagaaacctgcttcaagagagcttaaagttacatttttccctgacttaaatggtgatgtggtggctattgattataaacactacacaccctcttttaagaaaggagctaaattgttacataaacctattgtttggcatgttaacaatgcaactaataaagccacgtataaaccaaatacctggtgtatacgttgtctttggagcacaaaaccagttgaaacatcaaattcgtttgatgtactgaagtcagaggacgcgcagggaatggataatcttgcctgcgaagatctaaaaccagtctctgaagaagtagtggaaaatcctaccatacagaaagacgttcttgagtgtaatgtgaaaactaccgaagttgtaggagacattatacttaaaccagcaaataatagtttaaaaattacagaagaggttggccacacagatctaatggctgcttatgtagacaattctagtcttactattaagaaacctaatgaattatctagagtattaggtttgaaaacccttgctactcatggtttagctgctgttaatagtgtcccttgggatactatagctaattatgctaagccttttcttaacaaagttgttagtacaactactaacatagttacacggtgtttaaaccgtgtttgtactaattatatgccttatttctttactttattgctacaattgtgtacttttactagaagtacaaattctagaattaaagcatctatgccgactactatagcaaagaatactgttaagagtgtcggtaaattttgtctagaggcttcatttaattatttgaagtcacctaatttttctaaactgataaatattataatttggtttttactattaagtgtttgcctaggttctttaatctactcaaccgctgctttaggtgttttaatgtctaatttaggcatgccttcttactgtactggttacagagaaggctatttgaactctactaatgtcactattgcaacctactgtactggttctataccttgtagtgtttgtcttagtggtttagattctttagacacctatccttctttagaaactatacaaattaccatttcatcttttaaatgggatttaactgcttttggcttagttgcagagtggtttttggcatatattcttttcactaggtttttctatgtacttggattggctgcaatcatgcaattgtttttcagctattttgcagtacattttattagtaattcttggcttatgtggttaataattaatcttgtacaaatggccccgatttcagctatggttagaatgtacatcttctttgcatcattttattatgtatggaaaagttatgtgcatgttgtagacggttgtaattcatcaacttgtatgatgtgttacaaacgtaatagagcaacaagagtcgaatgtacaactattgttaatggtgttagaaggtccttttatgtctatgctaatggaggtaaaggcttttgcaaactacacaattggaattgtgttaattgtgatacattctgtgctggtagtacatttattagtgatgaagttgcgagagacttgtcactacagtttaaaagaccaataaatcctactgaccagtcttcttacatcgttgatagtgttacagtgaagaatggttccatccatctttactttgataaagctggtcaaaagacttatgaaagacattctctctctcattttgttaacttagacaacctgagagctaataacactaaaggttcattgcctattaatgttatagtttttgatggtaaatcaaaatgtgaagaatcatctgcaaaatcagcgtctgtttactacagtcagcttatgtgtcaacctatactgttactagatcaggcattagtgtctgatgttggtgatagtgcggaagttgcagttaaaatgtttgatgcttacgttaatacgttttcatcaacttttaacgtaccaatggaaaaactcaaaacactagttgcaactgcagaagctgaacttgcaaagaatgtgtccttagacaatgtcttatctacttttatttcagcagctcggcaagggtttgttgattcagatgtagaaactaaagatgttgttgaatgtcttaaattgtcacatcaatctgacatagaagttactggcgatagttgtaataactatatgctcacctataacaaagttgaaaacatgacaccccgtgaccttggtgcttgtattgactgtagtgcgcgtcatattaatgcgcaggtagcaaaaagtcacaacattgctttgatatggaacgttaaagatttcatgtcattgtctgaacaactacgaaaacaaatacgtagtgctgctaaaaagaataacttaccttttaagttgacatgtgcaactactagacaagttgttaatgttgtaacaacaaagatagcacttaagggtggtaaaattgttaataattggttgaagcagttaattaaagttacacttgtgttcctttttgttgctgctattttctatttaataacacctgttcatgtcatgtctaaacatactgacttttcaagtgaaatcataggatacaaggctattgatggtggtgtcactcgtgacatagcatctacagatacttgttttgctaacaaacatgctgattttgacacatggtttagccagcgtggtggtagttatactaatgacaaagcttgcccattgattgctgcagtcataacaagagaagtgggttttgtcgtgcctggtttgcctggcacgatattacgcacaactaatggtgactttttgcatttcttacctagagtttttagtgcagttggtaacatctgttacacaccatcaaaacttatagagtacactgactttgcaacatcagcttgtgttttggctgctgaatgtacaatttttaaagatgcttctggtaagccagtaccatattgttatgataccaatgtactagaaggttctgttgcttatgaaagtttacgccctgacacacgttatgtgctcatggatggctctattattcaatttcctaacacctaccttgaaggttctgttagagtggtaacaacttttgattctgagtactgtaggcacggcacttgtgaaagatcagaagctggtgtttgtgtatctactagtggtagatgggtacttaacaatgattattacagatctttaccaggagttttctgtggtgtagatgctgtaaatttacttactaatatgtttacaccactaattcaacctattggtgctttggacatatcagcatctatagtagctggtggtattgtagctatcgtagtaacatgccttgcctactattttatgaggtttagaagagcttttggtgaatacagtcatgtagttgcctttaatactttactattccttatgtcattcactgtactctgtttaacaccagtttactcattcttacctggtgtttattctgttatttacttgtacttgacattttatcttactaatgatgtttcnnttttagcacatattcagtggatggttatgttcacacctttagtacctttctggataacaattgcttatatcatttgtatttccacaaagcatttctattggttctttagtaattacctaaagagacgtgtagtctttaatggtgtttcctttagtacttttgaagaagctgcgctgtgcacctttttgttaaataaagaaatgtatctaaagttgcgtagtgatgtgctattacctcttacgcaatataatagatacttagctctttataataagtacaagtattttagtggagcaatggatacaactagctacagagaagctgcttgttgtcatctcgcaaaggctctcaatgacttcagtaactcaggttctgatgttctttaccaaccaccacaaacctctatcacctcagctgttttgcagagtggttttagaaaaatggcattcccatctggtaaagttgagggttgtatggtacaagtaacttgtggtacaactacacttaacggtctttggcttgatgacgtagtttactgtccaagacatgtgatctgcacctctgaagacatgcttaaccctaattatgaagatttactcattcgtaagtctaatcataatttcttggtacaggctggtaatgttcaactcagggttattggacattctatgcaaaattgtgtacttaagcttaaggttgatacagccaatcctaagacacctaagtataagtttgttcgcattcaaccaggacagactttttcagtgttagcttgttacaatggttcaccatctggtgtttaccaatgtgctatgaggcccaatttcactattaagggttcattccttaatggttcatgtggtagtgttggttttaacatagattatgactgtgtctctttttgttacatgcaccatatggaattaccaactggagttcatgctggcacagacttagaaggtaacttttatggaccttttgttgacaggcaaacagcacaagcagctggtacggacacaactattacagttaatgttttagcttggttgtacgctgctgttataaatggagacaggtggtttctcaatcgatttaccacaactcttaatgactttaaccttgtggctatgaagtacaattatgaacctctaacacaagaccatgttgacatactaggacctctttctgctcaaactggaattgccgttttagatatgtgtgcttcattaaaagaattactgcaaaatggtatgaatggacgtaccatattgggtagtgctttattagaagatgaatttacaccttttgatgttgttagacaatgctcaggtgttactttccaaagtgcagtgaaaagaacaatcaagggtacacaccactggttgttactcacaattttgacttcacttttagttttagtccagagtactcaatggtctttgttcttttttttgtatgaaaatgcctttttaccttttgctatgggtattattgctatgtctgcttttgcaatgatgtttgtcaaacataagcatgcatttctctgtttgtttttgttaccttctcttgccactgtagcttattttaatatggtctatatgcctgctagttgggtgatgcgtattatgacatggttggatatggttgatactagtttgtctggttttaagctaaaagactgtgttatgtatgcatcagctgtagtgttactaatccttatgacagcaagaactgtgtatgatgatggtgctaggagagtgtggacacttatgaatgtcttgacactcgtttataaagtttattatggtaatgctttagatcaagccatttccatgtgggctcttataatctctgttacttctaactactcaggtgtagttacaactgtcatgtttttggccagaggtattgtttttatgtgtgttgagtattgccctattttcttcataactggtaatacacttcagtgtataatgctagtttattgtttcttaggctatttttgtacttgttactttggcctcttttgtttactcaaccgctactttagactgactcttggtgtttatgattacttagtttctacacaggagtttagatatatgaattcacagggactactcccacccaagaatagcatagatgccttcaaactcaacattaaattgttgggtgttggtggcaaaccttgtatcaaagtagccactgtacagtctaaaatgtcagatgtaaagtgcacatcagtagtcttactctcagttttgcaacaactcagagtagaatcatcatctaaattgtgggctcaatgtgtccagttacacaatgacattctcttagctaaagatactactgaagcctttgaaaaaatggtttcactactttctgttttgctttccatgcagggtgctgtagacataaacaagctttgtgaagaaatgctggacaacagggcaaccttacaagctatagcctcagagtttagttcccttccatcatatgcagcttttgctactgctcaagaagcttatgagcaggctgttgctaatggtgattctgaagttgttcttaaaaagttgaagaagtctttgaatgtggctaaatctgaatttgaccgtgatgcagccatgcaacgtaagttggaaaagatggctgatcaagctatgacccaaatgtataaacaggctagatctgaggacaagagggcaaaagttactagtgctatgcagacaatgcttttcactatgcttagaaagttggataatgatgcactcaacaacattatcaacaatgcaagagatggttgtgttcccttgaacataatacctcttacaacagcagccaaactaatggttgtcataccagactataacacatataaaaatacgtgtgatggtacaacatttacttatgcatcagcattgtgggaaatccaacaggttgtagatgcagatagtaaaattgttcaacttagtgaaattagtatggacaattcacctaatttagcatggcctcttattgtaacagctttaagggccaattctgctgtcaaattacagaataatgagcttagtcctgttgcactacgacagatgtcttgtgctgccggtactacacaaactgcttgcactgatgacaatgcgttagcttactacaacacaacaaagggaggtaggtttgtacttgcactgttatccgatttacaggatttgaaatgggctagattccctaagagtgatggaactggtactatctatacagaactggaaccaccttgtaggtttgttacagacacacctaaaggtcctaaagtgaagtatttatactttattaaaggattaaacaacctaaatagaggtatggtacttggtagtttagctgccacagtacgtctacaagctggtaatgcaacagaagtgcctgccaattcaactgtattatctttctgtgcttttgctgtagatgctgctaaagcttacaaagattatctagctagtgggggacaaccaatcactaattgtgttaagatgttgtgtacacacactggtactggtcaggcaataacagttacaccggaagccaatatggatcaagaatcctttggtggtgcatcgtgttgtctgtactgccgttgccacatagatcatccaaatcctaaaggattttgtgacttaaaaggtaagtatgtacaaatacctacaacttgtgctaatgaccctgtgggttttacacttaaaaacacagtctgtaccgtctgcggtatgtggaaaggttatggctgtagttgtgatcaactccgcgaacccatgcttcagtcagctgatgcacaatcgtttttaaacgggtttgcggtgtaagtgcagcccgtcttacaccgtgcggcacaggcactagtactgatgtcgtatacagggcttttgacatytacaatgataaagtagctggttttgctaaattcctaaaaactaattgttgtcgcttccaagaaaaggacgaagatgacaatttaattgattcttactttgtagttaagagacacactttctctaactaccaacatgaagaaacaatttataatttacttaaggattgtccagctgttgctaaacatgacttctttaagtttagaatagacggtgacatggtaccacatatatcacgtcaacgtcttactaaatacacaatggcagacctcgtctatgctttaaggcattttgatgaaggtaattgtgacacattaaaagaaatacttgtcacatacaattgttgtgatgatgattatttcaataaaaaggactggtatgattttgtagaaaacccagatatattacgcgtatacgccaacttaggtgaacgtgtacgccaagctttgttaaaaacagtacaattctgtgatgccatgcgaaatgctggtattgttggtgtactgacattagataatcaagatctcaatggtaactggtatgatttcggtgatttcatacaaaccacgccaggtagtggagttcctgttgtagattcttattattcattgttaatgcctatattaaccttgaccagggctttaactgcagagtcacatgttgacactgacttaacaaagccttacattaagtgggatttgttaaaatatgacttcacggaagagaggttaaaactctttgaccgttattttaaatattgggatcagacataccacccaaattgtgttaactgtttggatgacagatgcattctgcattgtgcaaactttaatgttttattctctacagtgttcccacttacaagttttggaccactagtgagaaaaatatttgttgatggtgttccatttgtagtttcaactggataccacttcagagagctaggtgttgtacataatcaggatgtaaatttacatagctctagacttagttttaaggaattacttgtgtatgctgctgaccctgctatgcacgctgcttctggtaatctattactagataaacgcactacgtgcttttcagtagctgcacttactaacaatgttgcttttcaaactgtcaaacccggtaattttaacaaagacttctatgactttgctgtgtctaagggtttctttaaggaaggaagttctgttgaattaaaacacttcttctttgctcaggatggtaatgctgctatcagcgattatgactactatcgttataatctaccaacaatgtgtgatatcagacaactactatttgtagttgaagttgttgataagtactttgattgttacgatggtggctgtattaatgctaaccaagtcatcgtcaacaacctagacaaatcagctggttttccatttaataaatggggtaaggctagactttattatgattcaatgagttatgaggatcaagatgcacttttcgcatatacaaaacgtaatgtcatccctactataactcaaatgaatcttaagtatgccattagtgcaaagaatagagctcgcaccgtagctggtgtctctatctgtagtactatgaccaatagacagtttcatcaaaaattattgaaatcaatagccgccactagaggagctactgtagtaattggaacaagcaaattctatggtggttggcacaacatgttaaaaactgtttatagtgatgtagaaaaccctcaccttatgggttgggattatcctaaatgtgatagagccatgcctaayatgcttagaattatggcctcacttgttcttgctcgcaaacatacaacgtgttgtagcttgtcacaccgtttctatagattagctaatgagtgtgctcaagtattgagtgaaatggtcatgtgtggcggttcactatatgttaaaccaggtggaacctcatcaggagatgccacaactgcttatgctaatagtgtttttaacatttgtcaagctgtcacggccaatgttaatgcacttttatctactgatggtaacaaaattgccgataagtatgtccgcaatttacaacacagactttatgagtgtctctatagaaatagagatgttgacacagactttgtgaatgagttttacgcatatttgcgtaaacatttctcaatgatgatactctctgacgatgctgttgtgtgtttcaatagcacttatgcatctcaaggtctagtggctagcataaagaactttaagtcagttctttattatcaaaacaatgtttttatgtctgaagcaaaatgttggactgagactgaccttactaaaggacctcatgaattttgctctcaacatacaatgctagttaaacagggtgatgattatgtgtaccttccttacccagatccatcaagaatcctaggggccggctgttttgtagatgatatcgtaaaaacagatggtacacttatgattgaacggttcgtgtctttagctatagatgcttacccacttactaaacatcctaatcaggagtatgctgatgtctttcatttgtacttacaatacataagaaagctacatgatgagttaacaggacacatgttagacatgtattctgttatgcttactaatgataacacttcaaggtattgggaacctgagttttatgaggctatgtacacaccgcatacagtcttacaggctgttggggcttgtgttctttgcaattcacagacttcattaagatgtggtgcttgcatacgtagaccattcttatgttgtaaatgctgttacgaccatgtcatatcaacatcacataaattagtcttgtctgttaatccgtatgtttgcaatgctccaggttgtgatgtcacagatgtgactcaactttacttaggaggtatgagctattattgtaaatcacataaaccacccattagttttccattgtgtgctaatggacaagtttttggtttatataaaaatacatgtgttggtagcgataatgttactgactttaatgcaattgcaacatgtgactggacaaatgctggtgattacattttagctaacacctgtactgaaagactcaagctttttgcagcagaaacgctcaaagctactgaggagacatttaaactgtcttatggtattgctactgtacgtgaagtgctgtctgacagagaattacatctttcatgggaagttggtaaacctagaccaccacttaaccgaaattatgtctttactggttatcgtgtaactaaaaacagtaaagtacaaataggagagtacacctttgaaaaaggtgactatggtgatgctgttgtttaccgaggtacaacaacttacaaattaaatgttggtgattattttgtgctgacatcacatacagtaatgccattaagtgcacctacactagtgccacaagagcactatgttagaattactggcttatacccaacactcaatatctcagatgagttttctagcaatgttgcaaattatcaaaaggttggtatgcaaaagtattctacactccagggaccacctggtactggtaagagtcattttgctattggcctagctctctactacccttctgctcgcatagtgtatacagcttgctctcatgccgctgttgatgcactatgtgagaaggcattaaaatatttgcctatagataaatgtagtagaattatacctgcacgtgctcgtgtagagtgttttgataaattcaaagtgaattcaacattagaacagtatgtcttttgtactgtaaatgcattgcctgagacgacagcagatatagttgtctttgatgaaatttcaatggccacaaattatgatttgagtgttgtcaatgccagattacgtgctaagcactatgtgtacattggcgaccctgctcaattacctgcaccacgcacattgctaactaagggcacactagaaccagaatatttcaattcagtgtgtagacttatgaaaactataggtccagacatgttcctcggaacttgtcggcgttgtcctgctgaaattgttgacactgtgagtgctttggtttatgataataagcttaaagcacataaagacaaatcagctcaatgctttaaaatgttttataagggtgttatcacgcatgatgtttcatctgcaattaacaggccacaaataggcgtggtaagagaattccttacacgtaaccctgcttggagaaaagctgtctttatttcaccttataattcacagaatgctgtagcctcaaagattttgggactaccaactcaaactgttgattcatcacagggctcagaatatgactatgtcatattcactcaaaccactgaaacagctcactcttgtaatgtaaacagatttaatgttgctattaccagagcaaaagtaggcatactttgcataatgtctgatagagacctttatgacaagttgcaatttacaagtcttgaaattccacgtaggaatgtggcaactttacaagctgaaaatgtaacaggactctttaaagattgtagtaaggtaatcactgggttacatcctacacaggcacctacacacctcagtgttgacactaaattcaaaactgaaggtttatgtgttgacatacctggcatacctaaggacatgacctatagaagactcatctctatgatgggttttaaaatgaattatcaagttaatggttaccctaacatgtttatcacccgcgaagaagctataagacatgtacgtgcatggattggcttcgatgtcgaggggtgtcatgctactagagaagctgttggtaccaatttacctttacagctaggtttttctacaggtgttaacctagttgctgtacctacaggttatgttgatacacctaataatacagatttttccagagttagtgctaaaccaccgcctggagatcaatttaaacacctcataccacttatgtacaaaggacttccttggaatgtagtgcgtataaagattgtacaaatgttaagtgacacacttaaaaatctctctgacagagtcgtatttgtcttatgggcacatggctttgagttgacatctatgaagtattttgtgaaaataggacctgagcgcacctgttgtctatgtgatagacgtgccacatgcttttccactgcttcagacacttatgcctgttggcatcattctattggatttgattacgtctataatccgtttatgattgatgttcaacaatggggttttacaggtaacctacaaagcaaccatgatctgtattgtcaagtccatggtaatgcacatgtagctagttgtgatgcaatcatgactaggtgtctagctgtccacgagtgctttgttaagcgtgttgactggactattgaatatcctataattggtgatgaactgaagattaatgcggcttgtagaaaggttcaacacatggttgttaaagctgcattattagcagacaaattcccagttcttcacgacattggtaaccctaaagctattaagtgtgtacctcaagctgatgtagaatggaagttctatgatgcacagccttgtagtgacaaagcttataaaatagaagaattattctattcttatgccacacattctgacaaattcacagatggtgtatgcctattttggaattgcaatgtcgatagatatcctgctaattccattgtttgtagatttgacactagagtgctatctaaccttaacttgcctggttgtgatggtggcagtttgtatgtaaataaacatgcattccacacaccagcttttgataaaagtgcttttgttaatttaaaacaattaccatttttctattactctgacagtccatgtgagtctcatggaaaacaagtagtgtcagatatagattatgtaccactaaagtctgctacgtgtataacacgttgcaatttaggtggtgctgtctgtagacatcatgctaatgagtacagattgtatctcgatgcttataacatgatgatctcagctggctttagcttgtgggtttacaaacaatttgatacttataacctctggaacacttttacaagacttcagagtttagaaaatgtggcttttaatgttgtaaataagggacactttgatggacaacagggtgaagtaccagtttctatcattaataacactgtttacacaaaagttgatggtgttgatgtagaattgtttgaaaataaaacaacattacctgttaatgtagcatttgagctttgggctaagcgcaacattaaaccagtaccagaggtgaaaatactcaataatttgggtgtggacattgctgctaatactgtgatctgggactacaaaagagatgctccagcacatatatctactattggtgtttgttctatgactgacatagccaagaaaccaactgaaacgatttgtgcaccactcactgtcttttttgatggtagagttgatggtcaagtagacttatttagaaatgcccgtaatggtgttcttattacagaaggtagtgttaaaggtttacaaccatctgtaggtcccaaacaagctagtcttaatggagtcacattaattggagaagccgtaaaaacacagttcaattattataagaaagttgatggtgttgtccaacaattacctgaaacttactttactcagagtagaaatttacaagaatttaaacccaggagtcaaatggaaattgatttcttagaattagctatggatgaattcattgaacggtataaattagaaggctatgccttcgaacatatcgtttatggagattttagtcatagtcagttaggtggtttacatctactgattggactagctaaacgttttaaggaatcaccttttgaattagaagattttattcctatggacagtacagttaaaaactatttcataacagatgcgcaaacaggttcatctaagtgtgtgtgttctgttattgatttattacttgatgattttgttgaaataataaaatcccaagatttatctgtagtttctaaggttgtcaaagtgactattgactatacagaaatttcatttatgctttggtgtaaagatggccatgtagaaacattttacccaaaattacaatctagtcaagcgtggcaaccgggtgttgctatgcctaatctttacaaaatgcaaagaatgctattagaaaagtgtgaccttcaaaattatggtgatagtgcaacattacctaaaggcataatgatgaatgtcgcaaaatatactcaactgtgtcaatatttaaacacattaacattagctgtaccctataatatgagagttatacattttggtgctggttctgataaaggagttgcaccaggtacagctgttttaagacagtggttgcctacgggtacgctgcttgtcgactcagatcttaatgactttgtctctgatgcagattcaactttgattggtgattgtgcaactgtacatacagctaataaatgggatctcattattagtgatatgtacgaccctaagactaaaaatgttacaaaagaaaatgactctaaagagggttttttcacttacatttgtgggtttatacaacaaaagctagctcttggaggttccgtggctataaagataacagaacattcttggaatgctgatctttataagctcatgggacacttcgcatggtggacagcctttgttactaatgtgaatgcgtcatcatctgaagcatttttaattggatgtaattatcttggcaaaccacgcgaacaaatagatggttatgtcatgcatgcaaattacatattttggaggaatacaaatccaattcagttgtcttcctattctttatttgacatgagtaaatttccccttaaattaaggggtactgctgttatgtctttaaaagaaggtcaaatcaatgatatgattttatctcttcttagtaaaggtagacttataattagagaaaacaacagagttgttatttctagtgatgttcttgttaacaactaaacgaacaatgtttgtttttcttgttttattgccactagtctctagtcagtgtgttaatcttacaamcagaactcaattacccyctgcatacactaattctttcacacgtggtgtttattaccctgacaaagttttcagatcctcagttttacattcaactcaggacttgttcttacctttcttttccaatgttacttggttccatgctatacatgtctctgggaccaatggtactaagaggtttgataaccctgtcctaccatttaatgatggtgtttattttgcttccactgagaagtctaacataataagaggctggatttttggtactactttagattcgaagacccagtccctacttattgttaataacgctactaatgttgttattaaagtctgtgaatttcaattttgtaatgatccatttttgggtgtttattaccacaaaaacaacaaaagttggatggaaagtgagttcagagtttattctagtgcgaataattgcacttttgaatatgtctctcagccttttcttatggaccttgaaggaaaacagggtaatttcaaaaatcttagggaatttgtgtttaagaatattgatggttattttaaaatatattctaagcacacgcctattaatttagtgcgtgatctccctcagggtttttcggctttagaaccattggtagatttgccaataggtattaacatcactaggtttcaaactttacttgctttacatagaagttatttgactcctggtgattcttcttcaggttggacagctggtgctgcagcttattatgtgggttatcttcaacctaggacttttctattaaaatataatgaaaatggaaccattacagatgctgtagactgtgcacttgaccctctctcagaaacaaagtgtacgttgaaatccttcactgtagaaaaaggaatctatcaaacttctaactttagagtccaaccaacagaatctattgttagatttcctaatattacaaacttgtgcccttttggtgaagtttttaacgccaccagatttgcatctgtttatgcttggaacaggaagagaatcagcaactgtgttgctgattattctgtcctatataattccgcatcattttccacttttaagtgttatggagtgtctcctactaaattaaatgatctctgctttactaatgtctatgcagattcatttgtaattagaggtgatgaagtcagacaaatcgctccagggcaaactggaaagattgctgattataattataaattaccagatgattttacaggctgcgttatagcttggaattctaacaatcttgattctaaggttggtggtaattataattacctgtatagattgtttaggaagtctaatctcaaaccttttgagagagatatttcaactgaaatctatcaggccggtagcacaccttgtaatggtgttgaaggttttaattgttactttcctttacaatcatatggtttccaacccactaatggtgttggttaccaaccatacagagtagtagtactttcttttgaacttctacatgcaccagcaactgtttgtggacctaaaaagtctactaatttggttaaaaacaaatgtgtcaatttcaacttcaatggtttaacaggcacaggtgttcttactgagtctaacaaaaagtttctgcctttccaacaatttggcagagacattgctgacactactgatgctgtccgtgatccacagacacttgagattcttgacattacaccatgttcttttggtggtgtcagtgttataacaccaggaacaaatacttctaaccaggttgctgttctttatcagggtgttaactgcacagaagtccctgttgctattcatgcagatcaacttactcctacttggcgtgtttattctacaggttctaatgtttttcaaacacgtgcaggctgtttaataggggctgaacatgtcaacaactcatatgagtgtgacatacccattggtgcaggtatatgcgctagttatcagactcagactaattctcctcggcgggcacgtagtgtagctagtcaatccatcattgcctacactatgtcacttggtgcagaaaattcagttgcttactctaataactctattgccatacccacaaattttactattagtgttaccacagaaattctaccagtgtctatgaccaagacatcagtagattgtacaatgtacatttgtggtgattcaactgaatgcagcaatcttttgttgcaatatggcagtttttgtacacaattaaaccgtgctttaactggaatagctgttgaacaagacaaaaacacccaagaagtttttgcacaagtcaaacaaatttacaaaacaccaccaattaaagattttggtggttttaatttttcacaaatattaccagatccatcaaaaccaagcaagaggtcatttattgaagatctacttttcaacaaagtgacacttgcagatgctggcttcatcaaacaatatggtgattgccttggtgatattgctgctagagacctcatttgtgcacaaaagtttaacggccttactgttttgccacctttgctcacagatgaaatgattgctcaatacacttctgcactgttagcgggtacaatcacttctggttggacctttggtgcaggtgctgcattacaaataccatttgctatgcaaatggcttataggtttaatggtattggagttacacagaatgttctctatgagaaccaaaaattgattgccaaccaatttaatagtgctattggcaaaattcaagactcactttcttccacagcaagtgcacttggaaaacttcaagatgtggtcaaccaaaatgcacaagctttaaacacgcttgttaaacaacttagctccaattttggtgcaatttcaagtgttttaaatgatatcctttcacgtcttgacaaagttgaggctgaagtgcaaattgataggttgatcacaggcagacttcaaagtttgcagacatatgtgactcaacaattaattagagctgcagaaatcagagcttctgctaatcttgctgctactaaaatgtcagagtgtgtacttggacaatcaaaaagagttgatttttgtggaaagggctatcatcttatgtccttccctcagtcagcacctcatggtgtagtcttcttgcatgtgacttatgtccctgcacaagaaaagaacttcacaactgctcctgccatttgtcatgatggaaaagcacactttcctcgtgaaggtgtctttgtttcaaatggcacacactggtttgtaacacaaaggaatttttatgaaccacaaatcattactacagacaacacatttgtgtctggtaactgtgatgttgtaataggaattgtcaacaacacagtttatgatcctttgcaacctgaattagactcattcaaggaggagttagataaatattttaagaatcatacatcaccagatgttgatttaggtgacatctctggcattaatgcttcagttgtaaacattcaaaaagaaattgaccgcctcaatgaggttgccaagaatttaaatgaatctctcatcgatctccaagaacttggaaagtatgagcagtatataaaatggccatggtacatttggctaggttttatagctggcttgattgccatagtaatggtgacaattatgctttgctgtatgaccagttgctgtagttgtctcaagggctgttgttcttgtggatcctgctgcaaatttgatgaagacgactctgagccagtgctcaaaggagtcaaattacattacacataaacgaacttatggatttgtttatgagaatcttcacaattggaactgtaactttgaagcaaggtgaaatcaaggatgctactccttcagattttgttcgcgctactgcaacgataccgatacaagcctcactccctttcggatggcttattgttggcgttgcacttcttgctgtttttcagagcgcttccaaaatcataaccctcaaaaagagatggcaactagcactctccaagggtgttcactttgtttgcaacttgctgttgttgtttgtaacagtttactcacaccttttgctcgttgctgctggccttgaagccccttttctctatctttatgctttagtctacttcttgcagagtataaactttgtaagaataataatgmggctttggctttgctggaaatgccgttccaaaaacccattactttatgatgccaactattttctttgctggcatactaattgttacgactattgtataccttacaatagtgtaacttcttcaattgtcattacttcaggtgatggcacaacaagtcctatttctgaacatgactaccagattggtggttatactgaaaaatgggaatctggagtaaaagactgtgttgtattacacagttacttcacttcagactattaccagctgtactcaactcaattgagtacagacactggtgttgaacatgttaccttcttcatctacaataaaattgttgatgagcctgaagaacatgtccaaattcacacaatcgacggttcatccggagttgttaatccagtaatggaaccaatttatgatgaaccgacgacgactactagcgtgcctttgtaagcacaagctgatgagtacgaacttatgtactcattcgtttcggaagagacaggtacgttaatagttaatagcgtacttctttttcttgctttcgtggtattcttgctagttacactagccatccttactgcgcttcgattgtgtgcgtactgctgcaatattgttaacgtgagtcttgtaaaaccttctttttacgtttactctcgtgttaaaaatctgaattcttctagagttcctgatcttccggtctaaacgaactaaatattatattagtttttctgtttggaactttaattttagccatggcagattccaacggtactattaccgttgaagagcttaaaaagctccttgaacaatggaacctagtaataggtttcctattccttacatggatttgtcttctacaatttgcctatgccaacaggaataggtttttgtatataattaagttaattttcctctggctgttatggccagtaactttagcttgttttgtgcttgctgctgtttacagaataaattggatcaccggtggaattgctatcgcaatggcttgtcttgtaggcttgatgtggctcagctacttcattgcttctttcagactgtttgcgcgtacgcgttccatgtggtcattcaatccagaaactaacattcttctcaacgtgccactccatggcactattctgaccagaccgcttctagaaagtgaactcgtaatcggagctgtgatccttcgtggacatcttcgtattgctggacaccatctaggacgctgtgacatcaaggacctgcctaaagaaatcactgttgctacatcacgaacgctttcttattacaaattgggagcttcgcagcgtgtagcaggtgactcaggttttgctgcatacagtcgctacaggattggcaactataaattaaacacagaccattccagtagcagtgacaatattgctttgcttgtacagtaagtgacaacagatgtttcatctcgttgactttcaggttactatagcagagatattactaattattatgaggacttttaaagtttccatttggaatcttgattacatcataaacctcataattaaaaatttatctaagtcactaactgagaataaatattctcaattagatgaagagcaaccaatggagattgattaaacgaacatgaaaattattcttttcttggcactgataacactcgctacttgtgagctttatcactaccaagagtgtgttagaggtacaacagtacttttaaaagaaccttgctcttctggaacatacgagggcaattcaccatttcatcctctagctgataacaaatttgcactgacttgctttagcactcaatttgcttttgcttgtcctgacggcgtaaaacacgtctatcagttacgtgccagatcagtttcacctaaactgttcatcagacaagaggaagttcaagaactttactctccaatttttcttattgttgcggcaatagtgtttataacactttgcttcacactcaaaagaaagacagaatgattgaactttcattaattgacttctatttgtgctttttagcctttctgctattccttgttttaattatgcttattatcttttggttctcacttgaactgcaagatcataatgaaacttgtcacgcctaaacgaacatgaaatttcttgttttcttaggaatcatcacaactgtagctgcatttcaccaagaatgtagtttacagtcatgtactcaacatcaaccatatgtagttgatgacccgtgtcctattcacttctattctaaatggtatattagagtaggagctagaaaatcagcacctttaattgaattgtgcgtggatgaggctggttctaaatcacccattcagtacatcgatatcggtaattatacagtttcctgtttaccttttacaattaattgccaggaacctaaattgggtagtcttgtagtgcgttgttcgttctatgaagactttttagagtatcatgacgttcgtgttgttttagatttcatctaaacgaacaaactaaaatgtctgataatggaccccaaaatcagcgaaatgcaccccgcattacgtttggtggaccctcagattcaactggcagtaaccagaatggagaacgcagtggggcgcgatcaaaacaacgtcggccccaaggtttacccaataatactgcgtcttggttcaccgctctcactcaacatggcaaggaagaccttaaattccctcgaggacaaggcgttccaattaacaccaatagcagtccagatgaccaaattggctactaccgaagmgctaccagacgaattcgtggtggtgacggtaaaatgaaagatctcagtccaagatggtatttctactacctaggaactgggccagaagctggacttccctatggtgctaacaaagacggcatcatatgggttgcaactgagggagccttgaatacaccaaaagatcacattggcacccgcaatcctgctaacaatgctgcaatcgtgctacaacttcctcaaggaacaacattgccaaaaggcttctacgcagaagggagcagaggcggcagtcaagcctcttctcgttcctcatcacgtagtcgcaacagttcaagaaattcaactccaggcagcagtaggggaacttctcctgctagaatggctggcaatggcggtgatgctgctcttgctttgctgctgcttgacagattgaaccagcttgagagcaaaatgtctggtaaaggccaacaacaacaaggccaaactgtcactaagaaatctgctgctgaggcttctaagaagcctcggcaaaaacgtactgccactaaagcatacaatgtaacacaagctttcggcagacgtggtccagaacaaacccaaggaaattttggggaccaggaactaatcagacaaggaactgattacaaacattggccgcaaattgcacaatttgcccccagcgcttcagcgttcttcggaatgtcgcgcattggcatggaagtcacaccttcgggaacgtggttgacctacacaggtgccatcaaattggatgacaaagatccaaatttcaaagatcaagtcattttgctgaataagcatattgacgcatacaaaacattcccaccaacagagcctaaaaaggacaaaaagaagaaggctgatgaaactcaagccttaccgcagagacagaagaaacagcaaactgtgactcttcttcctgctgcagatttggatgatttctccaaacaattgcaacaatccatgagcagtgctgactcaactcaggcctaaactcatgcagaccacacaaggcagatgggctatataaacgttttcgcttttccgtttacgatatatagtctactcttgtgcagaatgaattctcgtaactacatagcacaagtagatgtagttaactttaatctcacatagcaatctttaatcagtgtgtaacattagggaggacttgaa

SEQ ID NO: 48 - DNA, 29732 bp, synthetic construct
  misc_feature 1..29732: note = Reconstituted virus 11
  source 1..29732: mol_type = other DNA
ggtttataccttcccaggtaacaaaccaaccaactttcgatctcttgtagatctgttctctaaacgaactttaaaatctgtgtggctgtcactcggctgcatgcttagtgcactcacgcagtataattaataactaattactgtcgttgacaggacacgagtaactcgtctatcttctgcaggctgcttacggtttcgtccgtgttgcagccgatcatcagcacatctaggttttgtccgggtgtgaccgaaaggtaagatggagagccttgtccctggtttcaacgagaaaacacacgtccaactcagtttgcctgttttacaggttcgcgacgtgctcgtacgtggctttggagactccgtggaggaggtcttatcagaggcacgtcaacatcttaaagatggcacttgtggcttagtagaagttgaaaaaggcgttttgcctcaacttgaacagccctatgtgttcatcaaacgttcggatgctcgaactgcacctcatggtcatgttatggttgagctggtagcagaactcgaaggcattcagtacggtcgtagtggtgagacacttggtgtccttgtccctcatgtgggcgaaataccagtggcttaccgcaaggttcttcttcgtaagaacggtaataaaggagctggtggccatagttacggcgccgatctaaagtcatttgacttaggcgacgagcttggcactgatccttatgaagattttcaagaaaactggaacactaaacatagcagtggtgttacccgtgaactcatgcgtgagcttaacggaggggcatacactcgctatgtcgataacaacttctgtggccctgatggctaccctcttgagtgcattaaagaccttctagcacgtgctggtaaagcttcatgcactttgtccgaacaactggactttattgacactaagaggggtgtatactgctgccgtgaacatgagcatgaaattgcttggtacacggaacgttctgaaaagagctatgaattgcagacaccttttgaaattaaattggcaaagaaatttgacaccttcaatggggaatgtccaaattttgtatttcccttaaattccataatcaagactattcaaccaagggttgaaaagaaaaagcttgatggctttatgggtagaattcgatctgtctatccagttgcgtcaccaaatgaatgcaaccaaatgtgcctttcaactctcatgaagtgtgatcattgtggtgaaacttcatggcagacgggcgattttgttaaagccacttgcgaattttgtggcactgagaatttgactaaagaaggtgccactacttgtggttacttaccccaaaatgctgttgttaaaatttattgtccagcatgtcacaattcagaagtaggacctgagcatagtcttgccgaataccataatgaatctggcttgaaaaccattcttcgtaagggtggtcgcactattgcctttggaggctgtgtgttctcttatgttggttgccataacaagtgtgcctattgggttccacgtgctagcgctaacataggttgtaaccatacaggtgttgttggagaaggttccgaaggtcttaatgacaaccttcttgaaatactccaaaaagagaaagtcaacatcaatattgttggtgactttaaacttaatgaagagatcgccattattttggcatctttttctgcttccacaagtgcttttgtggaaactgtgaaaggtttggattataaagcattcaaacaaattgttgaatcctgtggtaattttaaagttacaaaaggaaaagctaaaaaaggtgcctggaatattggtgaacagaaatcaatactgagtcctctttatgcatttgcatcagaggctgctcgtgttgtacgatcaattttctcccgcactcttgaaactgctcaaaattctgtgcgtgttttacagaaggccgctataacaatactagatggaatttcacagtattcactgagactcattgatgctatgatgttcacatctgatttggctactaacaatctagttgtaatggcctacattacaggtggtgttgttcagttgacttcgcagtggctaactaacatctttggcactgtttatgaaaaactcaaacccgtccttgattggcttgaagagaagtttaaggaaggtgtagagtttcttagagacggttgggaaattgttaaatttatctcaacctgtgcttgtgaaattgtcggtggacaaattgtcacctgtgcaaaggaaattaaggagagtgttcagacattctttaagcttgtaaataaatttttggctttgtgtgctgactctatcattattggtggagctaaacttaaagccttgaatttaggtgaaacatttgtcacgcactcaaagggattgtacagaaagtgtgttaaatccagagaagaaactggcctactcatgcctctaaaagccccaaaagaaattatcttcttagagggagaaacacttcccacagaagtgttaacagaggaagttgtcttgaaaactggtgatttacaaccattagaacaacctactagtgaagctgttgaagctccattggttggtacaccagtttgtattaacgggcttatgttgctcgaaatcaaagacacagaaaagtactgtgcccttgcacctaatatgatggtaacaaacaataccttcacactcaaaggcggtgcaccaacaaaggttacttttggtgatgacactgtgatagaagtgcaaggttacaagagtgtgaatatcacttttgaacttgatgaaaggattgataaagtacttaatgagaagtgctctgcctatacagttgaactcggtacagaagtaaatgagttcgcctgtgttgtggcagatgctgtcataaaaactttgcaaccagtatctgaattacttacaccactgggcattgatttagatgagtggagtatggctacatactacttatttgatgagtctggtgagtttaaattggcttcacatatgtattgttctttttaccctccagatgaggatgaagaagaaggtgattgtgaagaagaagagtttgagccatcaactcaatatgagtatggtactgaagatgattaccaaggtaaacctttggaatttggtgccacttctgctgctcttcaacctgaagaagagcaagaagaagattggttagatgatgatagtcaacaaactgttggtcaacaagacggcagtgaggacaatcagacaactactattcaaacaattgttgaggttcaacctcaattagagatggaacttacaccagttgttcagactattgaagtgaatagttttagtggttatttaaaacttactgacaatgtatacattaaaaatgcagacattgtggaagaagctaaaaaggtaaaaccaacagtggttgttaatgcagccaatgtttaccttaaacatggaggaggtgttgcaggagccttaaataaggctactaacaatgccatgcaagttgaatctgatgattacatagctactaatggaccacttaaagtgggtggtagttgtgttttaagcggacacaatcttgctaaacactgtcttcatgttgtcggcccaaatgttaacaaaggtgaagacattcaacttcttaagagtgcttatgaaaattttaatcagcacgaagttctacttgcaccattattatcagctggtatttttggtgctgaccctatacattctttaagagtttgtgtagatactgttcgcacaaatgtctacttagctgtctttgataaaaatctctatgacaaacttgtttcaagctttttggaaatgaagagtgaaaagcaagttgaacaaaagatcgctgagattcctaaagaggaagttaagccatttataactgaaagtaaaccttcagttgaacagagaaaacaagatgataagaaaatcaaagcttgtgttgaagaagttacaacaactctggaagaaactaagttcctcacagaaaacttgttactttatattgacattaatggcaatcttcatccagattctgccactcttgttagtgacattgacatcactttcttaaagaaagatgctccatatatagtgggtgatgttgttcaagagggtgttttaactgctgtggttatacctactaaaaaggctggtggcactactgaaatgctagcgaaagctttgagaaaagtgccaacagacaattatataaccacttacccgggtcagggtttaaatggttacactgtagaggaggcaaagacagtgcttaaaaagtgtaaaagtgccttttacattctaccatctattatctctaatgagaagcaagaaattcttggaactgtttcttggaatttgcgagaaatgcttgcacatgcagaagaaacacgcaaattaatgcctgtctgtgtggaaactaaagccatagtttcaactatacagcgtaaatataagggtattaaaatacaagagggtgtggttgattatggtgctagattttacttttacaccagtaaaacaactgtagcgtcacttatcaacacacttaacgatctaaatgaaactcttgttacaatgccacttggctatgtaacacatggcttaaatttggaagaagctgctcggtatatgagatctctcaaagtgccagctacagtttctgtttcttcacctgatgctgttacagcgtataatggttatcttacttcttcttctaaaacacctgaagaacattttattgaaaccatctcacttgctggttcctataaagattggtcctattctggacaatctacacaactaggtatagaatttcttaagagaggtgataaaagtgtatattacactagtaatcctaccacattccacctagatggtgaagttatcacctttgacaatcttaagacacttctttctttgagagaagtgaggactattaaggtgtttacaacagtagacaacattaacctccacacgcaagttgtggacatgtcaatgacatatggacaacagtttggtccaacttatttggatggagctgatgttactaaaataaaacctcataattcacatgaaggtaaaacattttatgttttacctaatgatgacactctacgtgttgaggcttttgagtactaccacacaactgatcctagttttctgggtaggtacatgtcagcattaaatcacactaaaaagtggaaatacccacaagttaatggtttaacttctattaaatgggcagataacaactgttatcttgccactgcattgttaacactccaacaaatagagttgaagtttaatccacctgctctacaagatgcttattacagagcaagggctggtgaagctgctaacttttgtgcacttatcttagcctactgtaataagacagtaggtgagttaggtgatgttagagaaacaatgagttacttgtttcaacatgccaatttagattcttgcaaaagagtcttgaacgtggtgtgtaaaacttgtggacaacagcagacaacccttaagggtgtagaagctgttatgtacatgggcacactttcttatgaacaatttaagaaaggtgttcagataccttgtacgtgtggtaaacaagctacaaaatatctagtacaacaggagtcaccttttgttatgatgtcagcaccacctgctcagtatgaacttaagcatggtacatttacttgtgctagtgagtacactggtaattaccagtgtggtcactataaacatataacttctaaagaaactttgtattgcatagacggtgctttacttacaaagtcctcagaatacaaaggtcctattacggatgttttctacaaagaaaacagttacacaacaaccataaaaccagttacttataaattggatggtgttgtttgtacagaaattgaccctaagttggacaattattataagaaagacaattnttatttcacagagcaaccaattgatcttgtaccaaaccaaccatatccaaacgcaagcttcgataattttaagtttgtatgtgataatatcaaatttgctgatgatttaaaccagttaactggttataagaaacctgcttcaagagagcttaaagttacatttttccctgacttaaatggtgatgtggtggctattgattataaacactacacaccctcttttaagaaaggagctaaattgttacataaacctattgtttggcatgttaacaatgcaactaataaagccacgtataaaccaaatacctggtgtatacgttgtctttggagcacaaaaccagttgaaacatcaaattcgtttgatgtactgaagtcagaggacgcgcagggaatggataatcttgcctgcgaagatctaaaaccagtctctgaagaagtagtggaaaatcctaccatacagaaagacgttcttgagtgtaatgtgaaaactaccgaagttgtaggagacattatacttaaaccagcaaataatagtttaaaaattacagaagaggttggccacacagatctaatggctgcttatgtagacaattctagtcttactattaagaaacctaatgaattatctagagtattaggtttgaaaacccttgctactcatggtttagctgctgttaatagtgtcccttgggatactatagctaattatgctaagccttttcttaacaaagttgttagtacaactactaacatagttacacggtgtttaaaccgtgtttgtactaattatatgccttatttctttactttattgctacaattgtgtacttttactagaagtacaaattctagaattaaagcatctatgccgactactatagcaaagaatactgttaagagtgtcggtaaattttgtctagaggcttcatttaattatttgaagtcacctaatttttctaaactgataaatattataatttggtttttactattaagtgtttgcctaggttctttaatctactcaaccgctgctttaggtgttttaatgtctaatttaggcatgccttcttactgtactggttacagagaaggctatttgaactctactaatgtcactattgcaacctactgtactggttctataccttgtagtgtttgtcttagtggtttagattctttagacacctatccttctttagaaactatacaaattaccatttcatcttttaaatgggatttaactgcttttggcttagttgcagagtggtttttggcatatattcttttcactaggtttttctatgtacttggattggctgcaatcatgcaattgtttttcagctattttgcagtacattttattagtaattcttggcttatgtggttaataattaatcttgtacaaatggccccgatttcagctatggttagaatgtacatcttctttgcatcattttattatgtatggaaaagttatgtgcatgttgtagacggttgtaattcatcaacttgtatgatgtgttacaaacgtaatagagcaacaagagtcgaatgtacaactattgttaatggtgttagaaggtccttttatgtctatgctaatggaggtaaaggcttttgcaaactacacaattggaattgtgttaattgtgatacattctgtgctggtagtacatttattagtgatgaagttgcgagagacttgtcactacagtttaaaagaccaataaatcctactgaccagtcttcttacatcgttgatagtgttacagtgaagaatggttccatccatctttactttgataaagctggtcaaaagacttatgaaagacattctctctctcattttgttaacttagacaacctgagagctaataacactaaaggttcattgcctattaatgttatagtttttgatggtaaatcaaaatgtgaagaatcatctgcaaaatcagcgtctgtttactacagtcagcttatgtgtcaacctatactgttactagatcaggcattagtgtctgatgttggtgatagtgcggaagttgcagttaaaatgtttgatgcttacgttaatacgttttcatcaacttttaacgtaccaatggaaaaactcaaaacactagttgcaactgcagaagctgaacttgcaaagaatgtgtccttagacaatgtcttatctacttttatttcagcagctcggcaagggtttgttgattcagatgtagaaactaaagatgttgttgaatgtcttaaattgtcacatcaatctgacatagaagttactggcgatagttgtaataactatatgctcacctataacaaagttgaaaacatgacaccccgtgaccttggtgcttgtattgactgtagtgcgcgtcatattaatgcgcaggtagcaaaaagtcacaacattgctttgatatggaacgttaaagatttcatgtcattgtctgaacaactacgaaaacaaatacgtagtgctgctaaaaagaataacttaccttttaagttgacatgtgcaactactagacaagttgttaatgttgtaacaacaaagatagcacttaagggtggtaaaattgttaataattggttgaagcagttaattaaagttacacttgtgttcctttttgttgctgctattttctatttaataacacctgttcatgtcatgtctaaacatactgacttttcaagtgaaatcataggatacaaggctattgatggtggtgtcactcgtgacatagcatctacagatacttgttttgctaacaaacatgctgattttgacacatggtttagccagcgtggtggtagttatactaatgacaaagcttgcccattgattgctgcagtcataacaagagaagtgggttttgtcgtgcctggtttgcctggcacgatattacgcacaactaatggtgactttttgcatttcttacctagagtttttagtgcagttggtaacatctgttacacaccatcaaaacttatagagtacactgactttgcaacatcagcttgtgttttggctgctgaatgtacaatttttaaagatgcttctggtaagccagtaccatattgttatgataccaatgtactagaaggttctgttgcttatgaaagtttacgccctgacacacgttatgtgctcatggatggctctattattcaatttcctaacacctaccttgaaggttctgttagagtggtaacaacttttgattctgagtactgtaggcacggcacttgtgaaagatcagaagctggtgtttgtgtatctactagtggtagatgggtacttaacaatgattattacagatctttaccaggagttttctgtggtgtagatgctgtaaatttacttactaatatgtttacaccactaattcaacctattggtgctttggacatatcagcatctatagtagctggtggtattgtagctatcgtagtaacatgccttgcctactattttatgaggtttagaagagcttttggtgaatacagtcatgtagttgcctttaatactttactattccttatgtcattcactgtactctgtttaacaccagtttactcattcttacctggtgtttattctgttatttacttgtacttgacattttatcttactaatgatgtttcnnttttagcacatattcagtggatggttatgttcacacctttagtacctttctggataacaattgcttatatcatttgtatttccacaaagcatttctattggttctttagtaattacctaaagagacgtgtagtctttaatggtgtttcctttagtacttttgaagaagctgcgctgtgcacctttttgttaaataaagaaatgtatctaaagttgcgtagtgatgtgctattacctcttacgcaatataatagatacttagctctttataataagtacaagtattttagtggagcaatggatacaactagctacagagaagctgcttgttgtcatctcgcaaaggctctcaatgacttcagtaactcaggttctgatgttctttaccaaccaccacaaacctctatcacctcagctgttttgcagagtggttttagaaaaatggcattcccatctggtaaagttgagggttgtatggtacaagtaacttgtggtacaactacacttaacggtctttggcttgatgacgtagtttactgtccaagacatgtgatctgcacctctgaagacatgcttaaccctaattatgaagatttactcattcgtaagtctaatcataatttcttggtacaggctggtaatgttcaactcagggttattggacattctatgcaaaattgtgtacttaagcttaaggttgatacagccaatcctaagacacctaagtataagtttgttcgcattcaaccaggacagactttttcagtgttagcttgttacaatggttcaccatctggtgtttaccaatgtgctatgaggcccaatttcactattaagggttcattccttaatggttcatgtggtagtgttggttttaacatagattatgactgtgtctctttttgttacatgcaccatatggaattaccaactggagttcatgctggcacagacttagaaggtaacttttatggaccttttgttgacaggcaaacagcacaagcagctggtacggacacaactattacagttaatgttttagcttggttgtacgctgctgttataaatggagacaggtggtttctcaatcgatttaccacaactcttaatgactttaaccttgtggctatgaagtacaattatgaacctctaacacaagaccatgttgacatactaggacctctttctgctcaaactggaattgccgttttagatatgtgtgcttcattaaaagaattactgcaaaatggtatgaatggacgtaccatattgggtagtgctttattagaagatgaatttacaccttttgatgttgttagacaatgctcaggtgttactttccaaagtgcagtgaaaagaacaatcaagggtacacaccactggttgttactcacaattttgacttcacttttagttttagtccagagtactcaatggtctttgttcttttttttgtatgaaaatgcctttttaccttttgctatgggtattattgctatgtctgcttttgcaatgatgtttgtcaaacataagcatgcatttctctgtttgtttttgttaccttctcttgccactgtagcttattttaatatggtctatatgcctgctagttgggtgatgcgtattatgacatggttggatatggttgatactagtttgtctggttttaagctaaaagactgtgttatgtatgcatcagctgtagtgttactaatccttatgacagcaagaactgtgtatgatgatggtgctaggagagtgtggacacttatgaatgtcttgacactcgtttataaagtttattatggtaatgctttagatcaagccatttccatgtgggctcttataatctctgttacttctaactactcaggtgtagttacaactgtcatgtttttggccagaggtattgtttttatgtgtgttgagtattgccctattttcttcataactggtaatacacttcagtgtataatgctagtttattgtttcttaggctatttttgtacttgttactttggcctcttttgtttactcaaccgctactttagactgactcttggtgtttatgattacttagtttctacacaggagtttagatatatgaattcacagggactactcccacccaagaatagcatagatgccttcaaactcaacattaaattgttgggtgttggtggcaaaccttgtatcaaagtagccactgtacagtctaaaatgtcagatgtaaagtgcacatcagtagtcttactctcagttttgcaacaactcagagtagaatcatcatctaaattgtgggctcaatgtgtccagttacacaatgacattctcttagctaaagatactactgaagcctttgaaaaaatggtttcactactttctgttttgctttccatgcagggtgctgtagacataaacaagctttgtgaagaaatgctggacaacagggcaaccttacaagctatagcctcagagtttagttcccttccatcatatgcagcttttgctactgctcaagaagcttatgagcaggctgttgctaatggtgattctgaagttgttcttaaaaagttgaagaagtctttgaatgtggctaaatctgaatttgaccgtgatgcagccatgcaacgtaagttggaaaagatggctgatcaagctatgacccaaatgtataaacaggctagatctgaggacaagagggcaaaagttactagtgctatgcagacaatgcttttcactatgcttagaaagttggataatgatgcactcaacaacattatcaacaatgcaagagatggttgtgttcccttgaacataatacctcttacaacagcagccaaactaatggttgtcataccagactataacacatataaaaatacgtgtgatggtacaacatttacttatgcatcagcattgtgggaaatccaacaggttgtagatgcagatagtaaaattgttcaacttagtgaaattagtatggacaattcacctaatttagcatggcctcttattgtaacagctttaagggccaattctgctgtcaaattacagaataatgagcttagtcctgttgcactacgacagatgtcttgtgctgccggtactacacaaactgcttgcactgatgacaatgcgttagcttactacaacacaacaaagggaggtaggtttgtacttgcactgttatccgatttacaggatttgaaatgggctagattccctaagagtgatggaactggtactatctatacagaactggaaccaccttgtaggtttgttacagacacacctaaaggtcctaaagtgaagtatttatactttattaaaggattaaacaacctaaatagaggtatggtacttggtagtttagctgccacagtacgtctacaagctggtaatgcaacagaagtgcctgccaattcaactgtattatctttctgtgcttttgctgtagatgctgctaaagcttacaaagattatctagctagtgggggacaaccaatcactaattgtgttaagatgttgtgtacacacactggtactggtcaggcaataacagttacaccggaagccaatatggatcaagaatcctttggtggtgcatcgtgttgtctgtactgccgttgccacatagatcatccaaatcctaaaggattttgtgacttaaaaggtaagtatgtacaaatacctacaacttgtgctaatgaccctgtgggttttacacttaaaaacacagtctgtaccgtctgcggtatgtggaaaggttatggctgtagttgtgatcaactccgcgaacccatgcttcagtcagctgatgcacaatcgtttttaaacgggtttgcggtgtaagtgcagcccgtcttacaccgtgcggcacaggcactagtactgatgtcgtatacagggcttttgacatctacaatgataaagtagctggttttgctaaattcctaaaaactaattgttgtcgcttccaagaaaaggacgaagatgacaatttaattgattcttactttgtagttaagagacacactttctctaactaccaacatgaagaaacaatttataatttacttaaggattgtccagctgttgctaaacatgacttctttaagtttagaatagacggtgacatggtaccacatatatcacgtcaacgtcttactaaatacacaatggcagacctcgtctatgctttaaggcattttgatgaaggtaattgtgacacattaaaagaaatacttgtcacatacaattgttgtgatgatgattatttcaataaaaaggactggtatgattttgtagaaaacccagatatattacgcgtatacgccaacttaggtgaacgtgtacgccaagctttgttaaaaacagtacaattctgtgatgccatgcgaaatgctggtattgttggtgtactgacattagataatcaagatctcaatggtaactggtatgatttcggtgatttcatacaaaccacgccaggtagtggagttcctgttgtagattcttattattcattgttaatgcctatattaaccttgaccagggctttaactgcagagtcacatgttgacactgacttaacaaagccttacattaagtgggatttgttaaaatatgacttcacggaagagaggttaaaactctttgaccgttattttaaatattgggatcagacataccacccaaattgtgttaactgtttggatgacagatgcattctgcattgtgcaaactttaatgttttattctctacagtgttcccacttacaagttttggaccactagtgagaaaaatatttgttgatggtgttccatttgtagtttcaactggataccacttcagagagctaggtgttgtacataatcaggatgtaaatttacatagctctagacttagttttaaggaattacttgtgtatgctgctgaccctgctatgcacgctgcttctggtaatctattactagataaacgcactacgtgcttttcagtagctgcacttactaacaatgttgcttttcaaactgtcaaacccggtaattttaacaaagacttctatgactttgctgtgtctaagggtttctttaaggaaggaagttctgttgaattaaaacacttcttctttgctcaggatggtaatgctgctatcagcgattatgactactatcgttataatctaccaacaatgtgtgatatcagacaactactatttgtagttgaagttgttgataagtactttgattgttacgatggtggctgtattaatgctaaccaagtcatcgtcaacaacctagacaaatcagctggttttccatttaataaatggggtaaggctagactttattatgattcaatgagttatgaggatcaagatgcacttttcgcatatacaaaacgtaatgtcatccctactataactcaaatgaatcttaagtatgccattagtgcaaagaatagagctcgcaccgtagctggtgtctctatctgtagtactatgaccaatagacagtttcatcaaaaattattgaaatcaatagccgccactagaggagctactgtagtaattggaacaagcaaattctatggtggttggcacaacatgttaaaaactgtttatagtgatgtagaaaaccctcaccttatgggttgggattatcctaaatgtgatagagccatgcctaayatgcttagaattatggcctcacttgttcttgctcgcaaacatacaacgtgttgtagcttgtcacaccgtttctatagattagctaatgagtgtgctcaagtattgagtgaaatggtcatgtgtggcggttcactatatgttaaaccaggtggaacctcatcaggagatgccacaactgcttatgctaatagtgtttttaacatttgtcaagctgtcacggccaatgttaatgcacttttatctactgatggtaacaaaattgccgataagtatgtccgcaatttacaacacagactttatgagtgtctctatagaaatagagatgttgacacagactttgtgaatgagttttacgcatatttgcgtaaacatttctcaatgatgatactctctgacgatgctgttgtgtgtttcaatagcacttatgcatctcaaggtctagtggctagcataaagaactttaagtcagttctttattatcaaaacaatgtttttatgtctgaagcaaaatgttggactgagactgaccttactaaaggacctcatgaattttgctctcaacatacaatgctagttaaacagggtgatgattatgtgtaccttccttacccagatccatcaagaatcctaggggccggctgttttgtagatgatatcgtaaaaacagatggtacacttatgattgaacggttcgtgtctttagctatagatgcttacccacttactaaacatcctaatcaggagtatgctgatgtctttcatttgtacttacaatacataagaaagctacatgatgagttaacaggacacatgttagacatgtattctgttatgcttactaatgataacacttcaaggtattgggaacctgagttttatgaggctatgtacacaccgcatacagtcttacaggctgttggggcttgtgttctttgcaattcacagacttcattaagatgtggtgcttgcatacgtagaccattcttatgttgtaaatgctgttacgaccatgtcatatcaacatcacataaattagtcttgtctgttaatccgtatgtttgcaatgctccaggttgtgatgtcacagatgtgactcaactttacttaggaggtatgagctattattgtaaatcacataaaccacccattagttttccattgtgtgctaatggacaagtttttggtttatataaaaatacatgtgttggtagcgataatgttactgactttaatgcaattgcaacatgtgactggacaaatgctggtgattacattttagctaacacctgtactgaaagactcaagctttttgcagcagaaacgctcaaagctactgaggagacatttaaactgtcttatggtattgctactgtacgtgaagtgctgtctgacagagaattacatctttcatgggaagttggtaaacctagaccaccacttaaccgaaattatgtctttactggttatcgtgtaactaaaaacagtaaagtacaaataggagagtacacctttgaaaaaggtgactatggtgatgctgttgtttaccgaggtacaacaacttacaaattaaatgttggtgattattttgtgctgacatcacatacagtaatgccattaagtgcacctacactagtgccacaagagcactatgttagaattactggcttatacccaacactcaatatctcagatgagttttctagcaatgttgcaaattatcaaaaggttggtatgcaaaagtattctacactccagggaccacctggtactggtaagagtcattttgctattggcctagctctctactacccttctgctcgcatagtgtatacagcttgctctcatgccgctgttgatgcactatgtgagaaggcattaaaatatttgcctatagataaatgtagtagaattatacctgcacgtgctcgtgtagagtgttttgataaattcaaagtgaattcaacattagaacagtatgtcttttgtactgtaaatgcattgcctgagacgacagcagatatagttgtctttgatgaaatttcaatggccacaaattatgatttgagtgttgtcaatgccagattacgtgctaagcactatgtgtacattggcgaccctgctcaattacctgcaccacgcacattgctaactaagggcacactagaaccagaatatttcaattcagtgtgtagacttatgaaaactataggtccagacatgttcctcggaacttgtcggcgttgtcctgctgaaattgttgacactgtgagtgctttggtttatgataataagcttaaagcacataaagacaaatcagctcaatgctttaaaatgttttataagggtgttatcacgcatgatgtttcatctgcaattaacaggccacaaataggcgtggtaagagaattccttacacgtaaccctgcttggagaaaagctgtctttatttcaccttataattcacagaatgctgtagcctcaaagattttgggactaccaactcaaactgttgattcatcacagggctcagaatatgactatgtcatattcactcaaaccactgaaacagctcactcttgtaatgtaaacagatttaatgttgctattaccagagcaaaagtaggcatactttgcataatgtctgatagagacctttatgacaagttgcaatttacaagtcttgaaattccacgtaggaatgtggcaactttacaagctgaaaatgtaacaggactctttaaagattgtagtaaggtaatcactgggttacatcctacacaggcacctacacacctcagtgttgacactaaattcaaaactgaaggtttatgtgttgacatacctggcatacctaaggacatgacctatagaagactcatctctatgatgggttttaaaatgaattatcaagttaatggttaccctaacatgtttatcacccgcgaagaagctataagacatgtacgtgcatggattggcttcgatgtcgaggggtgtcatgctactagagaagctgttggtaccaatttacctttacagctaggtttttctacaggtgttaacctagttgctgtacctacaggttatgttgatacacctaataatacagatttttccagagttagtgctaaaccaccgcctggagatcaatttaaacacctcataccacttatgtacaaaggacttccttggaatgtagtgcgtataaagattgtacaaatgttaagtgacacacttaaaaatctctctgacagagtcgtatttgtcttatgggcacatggctttgagttgacatctatgaagtattttgtgaaaataggacctgagcgcacctgttgtctatgtgatagacgtgccacatgcttttccactgcttcagacacttatgcctgttggcatcattctattggatttgattacgtctataatccgtttatgattgatgttcaacaatggggttttacaggtaacctacaaagcaaccatgatctgtattgtcaagtccatggtaatgcacatgtagctagttgtgatgcaatcatgactaggtgtctagctgtccacgagtgctttgttaagcgtgttgactggactattgaatatcctataattggtgatgaactgaagattaatgcggcttgtagaaaggttcaacacatggttgttaaagctgcattattagcagacaaattcccagttcttcacgacattggtaaccctaaagctattaagtgtgtacctcaagctgatgtagaatggaagttctatgatgcacagccttgtagtgacaaagcttataaaatagaagaattattctattcttatgccacacattctgacaaattcacagatggtgtatgcctattttggaattgcaatgtcgatagatatcctgctaattccattgtttgtagatttgacactagagtgctatctaaccttaacttgcctggttgtgatggtggcagtttgtatgtaaataaacatgcattccacacaccagcttttgataaaagtgcttttgttaatttaaaacaattaccatttttctattactctgacagtccatgtgagtctcatggaaaacaagtagtgtcagatatagattatgtaccactaaagtctgctacgtgtataacacgttgcaatttaggtggtgctgtctgtagacatcatgctaatgagtacagattgtatctcgatgcttataacatgatgatctcagctggctttagcttgtgggtttacaaacaatttgatacttataacctctggaacacttttacaagacttcagagtttagaaaatgtggcttttaatgttgtaaataagggacactttgatggacaacagggtgaagtaccagtttctatcattaataacactgtttacacaaaagttgatggtgttgatgtagaattgtttgaaaataaaacaacattacctgttaatgtagcatttgagctttgggctaagcgcaacattaaaccagtaccagaggtgaaaatactcaataatttgggtgtggacattgctgctaatactgtgatctgggactacaaaagagatgctccagcacatatatctactattggtgtttgttctatgactgacatagccaagaaaccaactgaaacgatttgtgcaccactcactgtcttttttgatggtagagttgatggtcaagtagacttatttagaaatgcccgtaatggtgttcttattacagaaggtagtgttaaaggtttacaaccatctgtaggtcccaaacaagctagtcttaatggagtcacattaattggagaagccgtaaaaacacagttcaattattataagaaagttgatggtgttgtccaacaattacctgaaacttactttactcagagtagaaatttacaagaatttanncccaggagtcaaatggaaattgatttcttagaattagctatggatgaattcattgaacggtataaattagaaggctatgccttcgaacatatcgtttatggagattttagtcatagtcagttaggtggtttacatctactgattggactagctaaacgttttaaggaatcaccttttgaattagaagattttattcctatggacagtacagttaaaaactatttcataacagatgcgcaaacaggttcatctaagtgtgtgtgttctgttattgatttattacttgatgatttngttgaaataataaaatcccaagatttatctgtagtttctaaggttgtcaaagtgactattgactatacagaaatttcatttatgctttggtgtaaagatggccatgtagaaacattttacccaaaattacaatctagtcaagcgtggcaaccgggtgttgctatgcctaatctttacaaaatgcaaagaatgctattagaaaagtgtgaccttcaaaattatggtgatagtgcaacattacctaaaggcataatgatgaatgtcgcaaaatatactcaactgtgtcaatatttaaacacattaacattagctgtaccctataatatgagagttatacattttggtgctggttctgataaaggagttgcaccaggtacagctgttttaagacagtggttgcctacgggtacgctgcttgtcgactcagatcttaatgactttgtctctgatgcagattcaactttgattggtgattgkgcaactgtacatacagctaataaatgggatctcattattagtgatatgtacgaccctaagactaaaaatgttacaaaagaaaatgactctaaagagggttttttcacttacatttgtgggtttatacaacaaaagctagctcttggaggttccgtggctataaagataacagaacattcttggaatgctgatctttataagctcatgggacacttcgcatggtggacagcctttgttactaatgtgaatgcgtcatcatctgaagcatttttaattggatgtaattatcttggcaaaccacgcgaacaaatagatggttatgtcatgcatgcaaattacatattttggaggaatacaaatccaattcagttgtcttcctattctttatttgacatgagtaaatttccccttaaattaaggggtactgctgttatgtctttaaaagaaggtcaaatcaatgatatgattttatctcttcttagtaaaggtagacttataattagagaaaacaacagagttgttatttctagtgatgttcttgttaacaactaaacgaacaatgtttgtttttcttgttttattgccactagtctctagtcagtgtgttaatcttacaamcagaactcaattacccyctgcatacactaattctttcacacgtggtgtttattaccctgacaaagttttcagatcctcagttttacattcaactcaggacttgttcttacctttcttttccaatgttacttggttccatgctatacatgtctctgggaccaatggtactaagaggtttgataaccctgtcctaccatttaatgatggtgtttattttgcttccactgagaagtctaacataataagaggctggatttttggtactactttagattcgaagacccagtccctacttattgttaataacgctactaatgttgttattaaagtctgtgaatttcaattttgtaatgatccatttttgggtgtttattaccacaaaaacaacaaaagttggatggaaagtgagttcagagtttattctagtgcgaataattgcacttttgaatatgtctctcagccttttcttatggaccttgaaggaaaacagggtaatttcaaaaatcttagggaatttgtgtttaagaatattgatggttattttaaaatatattctaagcacacgcctattaatttagtgcgtgatctccctcagggtttttcggctttagaaccattggtagatttgccaataggtattaacatcactaggtttcaaactttacttgctttacatagaagttatttgactcctggtgattcttcttcaggttggacagctggtgctgcagcttattatgtgggttatcttcaacctaggacttttctattaaaatataatgaaaatggaaccattacagatgctgtagactgtgcacttgaccctctctcagaaacaaagtgtacgttgaaatccttcactgtagaaaaaggaatctatcaaacttctaactttagagtccaaccaacagaatctattgttagatttcctaatattacaaacttgtgcccttttggtgaagtttttaacgccaccagatttgcatctgtttatgcttggaacaggaagagaatcagcaactgtgttgctgattattctgtcctatataattccgcatcattttccacttttaagtgttatggagtgtctcctactaaattaaatgatctctgctttactaatgtctatgcagattcatttgtaattagaggtgatgaagtcagacaaatcgctccagggcaaactggaaagattgctgattataattataaattaccagatgattttacaggctgcgttatagcttggaattctaacaatcttgattctaaggttggtggtaattataattacctgtatagattgtttaggaagtctaatctcaaaccttttgagagagatatttcaactgaaatctatcaggccggtagcacaccttgtaatggtgttgaaggttttaattgttactttcctttacaatcatatggtttccaacccactaatggtgttggttaccaaccatacagagtagtagtactttcttttgaacttctacatgcaccagcaactgtttgtggacctaaaaagtctactaatttggttaaaaacaaatgtgtcaatttcaacttcaatggtttaacaggcacaggtgttcttactgagtctaacaaaaagtttctgcctttccaacaatttggcagagacattgctgacactactgatgctgtccgtgatccacagacacttgagattcttgacattacaccatgttcttttggtggtgtcagtgttataacaccaggaacaaatacttctaaccaggttgctgttctttatcagggtgttaactgcacagaagtccctgttgctattcatgcagatcaacttactcctacttggcgtgtttattctacaggttctaatgtttttcaaacacgtgcaggctgtttaataggggctgaacatgtcaacaactcatatgagtgtgacatacccattggtgcaggtatatgcgctagttatcagactcagactaattctcctcggcgggcacgtagtgtagctagtcaatccatcattgcctacactatgtcacttggtgcagaaaattcagttgcttactctaataactctattgccatacccacaaattttactattagtgttaccacagaaattctaccagtgtctatgaccaagacatcagtagattgtacaatgtacatttgtggtgattcaactgaatgcagcaatcttttgttgcaatatggcagtttttgtacacaattaaaccgtgctttaactggaatagctgttgaacaagacaaaaacacccaagaagtttttgcacaagtcaaacaaatttacaaaacaccaccaattaaagattttggtggttttaatttttcacaaatattaccagatccatcaaaaccaagcaagaggtcatttattgaagatctacttttcaacaaagtgacacttgcagatgctggcttcatcaaacaatatggtgattgccttggtgatattgctgctagagacctcatttgtgcacaaaagtttaacggccttactgttttgccacctttgctcacagatgaaatgattgctcaatacacttctgcactgttagcgggtacaatcacttctggttggacctttggtgcaggtgctgcattacaaataccatttgctatgcaaatggcttataggtttaatggtattggagttacacagaatgttctctatgagaaccaaaaattgattgccaaccaatttaatagtgctattggcaaaattcaagactcactttcttccacagcaagtgcacttggaaaacttcaagatgtggtcaaccaaaatgcacaagctttaaacacgcttgttaaacaacttagctccaattttggtgcaatttcaagtgttttaaatgatatcctttcacgtcttgacaaagttgaggctgaagtgcaaattgataggttgatcacaggcagacttcaaagtttgcagacatatgtgactcaacaattaattagagctgcagaaatcagagcttctgctaatcttgctgctactaaaatgtcagagtgtgtacttggacaatcaaaaagagttgatttttgtggaaagggctatcatcttatgtccttccctcagtcagcacctcatggtgtagtcttcttgcatgtgacttatgtccctgcacaagaaaagaacttcacaactgctcctgccatttgtcatgatggaaaagcacactttcctcgtgaaggtgtctttgtttcaaatggcacacactggtttgtaacacaaaggaatttttatgaaccacaaatcattactacagacaacacatttgtgtctggtaactgtgatgttgtaataggaattgtcaacaacacagtttatgatcctttgcaacctgaattagactcattcaaggaggagttagataaatattttaagaatcatacatcaccagatgttgatttaggtgacatctctggcattaatgcttcagttgtaaacattcaaaaagaaattgaccgcctcaatgaggttgccaagaatttaaatgaatctctcatcgatctccaagaacttggaaagtatgagcagtatataaaatggccatggtacatttggctaggttttatagctggcttgattgccatagtaatggtgacaattatgctttgctgtatgaccagttgctgtagttgtctcaagggctgttgttcttgtggatcctgctgcaaatttgatgaagacgactctgagccagtgctcaaaggagtcaaattacattacacataaacgaacttatggatttgtttatgagaatcttcacaattggaactgtaactttgaagcaaggtgaaatcaaggatgctactccttcagattttgttcgcgctactgcaacgataccgatacaagcctcactccctttcggatggcttattgttggcgttgcacttcttgctgtttttcagagcgcttccaaaatcataaccctcaaaaagagatggcaactagcactctccaagggtgttcactttgtttgcaacttgctgttgttgtttgtaacagtttactcacaccttttgctcgttgctgctggccttgaagccccttttctctatctttatgctttagtctacttcttgcagagtataaactttgtaagaataataatgmggctttggctttgctggaaatgccgttccaaaaacccattactttatgatgccaactattttctttgctggcatactaattgttacgactattgtataccttacaatagtgtaacttcttcaattgtcattacttcaggtgatggcacaacaagtcctatttctgaacatgactaccagattggtggttatactgaaaaatgggaatctggagtaaaagactgtgttgtattacacagttacttcacttcagactattaccagctgtactcaactcaattgagtacagacactggtgttgaacatgttaccttcttcatctacaataaaattgttgatgagcctgaagaacatgtccaaattcacacaatcgacggttcatccggagttgttaatccagtaatggaaccaatttatgatgaaccgacgacgactactagcgtgcctttgtaagcacaagctgatgagtacgaacttatgtactcattcgtttcggaagagacaggtacgttaatagttaatagcgtacttctttttcttgctttcgtggtattcttgctagttacactagccatccttactgcgcttcgattgtgtgcgtactgctgcaatattgttaacgtgagtcttgtaaaaccttctttttacgtttactctcgtgttaaaaatctgaattcttctagagttcctgatcttccggtctaaacgaactaaatattatattagtttttctgtttggaactttaattttagccatggcagattccaacggtactattaccgttgaagagcttaaaaagctccttgaacaatggaacctagtaataggtttcctattccttacatggatttgtcttctacaatttgcctatgccaacaggaataggtttttgtatataattaagttaattttcctctggctgttatggccagtaactttagcttgttttgtgcttgctgctgtttacagaataaattggatcaccggtggaattgctatcgcaatggcttgtcttgtaggcttgatgtggctcagctacttcattgcttctttcagactgtttgcgcgtacgcgttccatgtggtcattcaatccagaaactaacattcttctcaacgtgccactccatggcactattctgaccagaccgcttctagaaagtgaactcgtaatcggagctgtgatccttcgtggacatcttcgtattgctggacaccatctaggacgctgtgacatcaaggacctgcctaaagaaatcactgttgctacatcacgaacgctttcttattacaaattgggagcttcgcagcgtgtagcaggtgactcaggttttgctgcatacagtcgctacaggattggcaactataaattaaacacagaccattccagtagcagtgacaatattgctttgcttgtacagtaagtgacaacagatgtttcatctcgttgactttcaggttactatagcagagatattactaattattatgaggacttttaaagtttccatttggaatcttgattacatcataaacctcataattaaaaatttatctaagtcactaactgagaataaatattctcaattagatgaagagcaaccaatggagattgattaaacgaacatgaaaattattcttttcttggcactgataacactcgctacttgtgagctttatcactaccaagagtgtgttagaggtacaacagtacttttaaaagaaccttgctcttctggaacatacgagggcaattcaccatttcatcctctagctgataacaaatttgcactgacttgctttagcactcaatttgcttttgcttgtcctgacggcgtaaaacacgtctatcagttacgtgccagatcagtttcacctaaactgttcatcagacaagaggaagttcaagaactttactctccaatttttcttattgttgcggcaatagtgtttataacactttgcttcacactcaaaagaaagacagaatgattgaactttcattaattgacttctatttgtgctttttagcctttctgctattccttgttttaattatgcttattatcttttggttctcacttgaactgcaagatcataatgaaacttgtcacgcctaaacgaacatgaaatttcttgttttcttaggaatcatcacaactgtagctgcatttcaccaagaatgtagtttacagtcatgtactcaacatcaaccatatgtagttgatgacccgtgtcctattcacttctattctaaatggtatattagagtaggagctagaaaatcagcacctttaattgaattgtgcgtggatgaggctggttctaaatcacccattcagtacatcgatatcggtaattatacagtttcctgtttaccttttacaattaattgccaggaacctaaattgggtagtcttgtagtgcgttgttcgttctatgaagactttttagagtatcatgacgttcgtgttgttttagatttcatctaaacgaacaaactaaaatgtctgataatggaccccaaaatcagcgaaatgcaccccgcattacgtttggtggaccctcagattcaactggcagtaaccagaatggagaacgcagtggggcgcgatcaaaacaacgtcggccccaaggtttacccaataatactgcgtcttggttcaccgctctcactcaacatggcaaggaagaccttaaattccctcgaggacaaggcgttccaattaacaccaatagcagtccagatgaccaaattggctactaccgaagmgctaccagacgaattcgtggtggtgacggtaaaatgaaagatctcagtccaagatggtatttctactacctaggaactgggccagaagctggacttccctatggtgctaacaaagacggcatcatatgggttgcaactgagggagccttgaatacaccaaaagatcacattggcacccgcaatcctgctaacaatgctgcaatcgtgctacaacttcctcaaggaacaacattgccaaaaggcttctacgcagaagggagcagaggcggcagtcaagcctcttctcgttcctcatcacgtagtcgcaacagttcaagaaattcaactccaggcagcagtaggggaacttctcctgctagaatggctggcaatggcggtgatgctgctcttgctttgctgctgcttgacagattgaaccagcttgagagcaaaatgtctggtaaaggccaacaacaacaaggccaaactgtcactaagaaatctgctgctgaggcttctaagaagcctcggcaaaaacgtactgccactaaagcatacaatgtaacacaagctttcggcagacgtggtccagaacaaacccaaggaaattttggggaccaggaactaatcagacaaggaactgattacaaacattggccgcaaattgcacaatttgcccccagcgcttcagcgttcttcggaatgtcgcgcattggcatggaagtcacaccttcgggaacgtggttgacctacacaggtgccatcaaattggatgacaaagatccaaatttcaaagatcaagtcattttgctgaataagcatattgacgcatacaaaacattcccaccaacagagcctaaaaaggacaaaaagaagaaggctgatgaaactcaagccttaccgcagagacagaagaaacagcaaactgtgactcttcttcctgctgcagatttggatgatttctccaaacaattgcaacaatccatgagcagtgctgactcaactcaggcctaaactcatgcagaccacacaaggcagatgggctatataaacgttttcgcttttccgtttacgatatatagtctactcttgtgcagaatgaattctcgtaactacatagcacaagtagatgtagttaactttaatctcacatagcaatctttaatcagtgtgtaacattagggaggacttgaaagagccaccacattttcaccgaggc

SEQ ID NO: 49 - DNA, 29810 bp, synthetic construct
  misc_feature 1..29810: note = Reconstituted virus 12
  source 1..29810: mol_type = other DNA
accaactttcgatctcttgtagatctgttctctaaacgaactttaaaatctgtgtggctgtcactcggctgcatgcttagtgcactcacgcagtataattaataactaattactgtcgttgacaggacacgagtaactcgtctatcttctgcaggctgcttacggtttcgtccgtgttgcagccgatcatcagcacatctaggttttgtccgggtgtgaccgaaaggtaagatggagagccttgtccctggtttcaacgagaaaacacacgtccaactcagtttgcctgttttacaggttcgcgacgtgctcgtacgtggctttggagactccgtggaggaggtcttatcagaggcacgtcaacatcttaaagatggcacttgtggcttagtagaagttgaaaaaggcgttttgcctcaacttgaacagccctatgtgttcatcaaacgttcggatgctcgaactgcacctcatggtcatgttatggttgagctggtagcagaactcgaaggcattcagtacggtcgtagtggtgagacacttggtgtccttgtccctcatgtgggcgaaataccagtggcttaccgcaaggttcttcttcgtaagaacggtaataaaggagctggtggccatagttacggcgccgatctaaagtcatttgacttaggcgacgagcttggcactgatccttatgaagattttcaagaaaactggaacactaaacatagcagtggtgttacccgtgaactcatgcgtgagcttaacggaggggcatacactcgctatgtcgataacaacttctgtggccctgatggctaccctcttgagtgcattaaagaccttctagcacgtgctggtaaagcttcatgcactttgtccgaacaactggactttattgacactaagaggggtgtatactgctgccgtgaacatgagcatgaaattgcttggtacacggaacgttctgaaaagagctatgaattgcagacaccttttgaaattaaattggcaaagaaatttgacaccttcaatggggaatgtccaaattttgtatttcccttaaattccataatcaagactattcaaccaagggttgaaaagaaaaagcttgatggctttatgggtagaattcgatctgtctatccagttgcgtcaccaaatgaatgcaaccaaatgtgcctttcaactctcatgaagtgtgatcattgtggtgaaacttcatggcagacgggcgattttgttaaagccacttgcgaattttgtggcactgagaatttgactaaagaaggtgccactacttgtggttacttaccccaaaatgctgttgttaaaatttattgtccagcatgtcacaattcagaagtaggacctgagcatagtcttgccgaataccataatgaatctggcttgaaaaccattcttcgtaagggtggtcgcactattgcctttggaggctgtgtgttctcttatgttggttgccataacaagtgtgcctattgggttccacgtgctagcgctaacataggttgtaaccatacaggtgttgttggagaaggttccgaaggtcttaatgacaaccttcttgaaatactccaaaaagagaaagtcaacatcaatattgttggtgactttaaacttaatgaagagatcgccattattttggcatctttttctgcttccacaagtgcttttgtggaaactgtgaaaggtttggattataaagcattcaaacaaattgttgaatcctgtggtaattttaaagttacaaaaggaaaagctaaaaaaggtgcctggaatattggtgaacagaaatcaatactgagtcctctttatgcatttgcatcagaggctgctcgtgttgtacgatcaattttctcccgcactcttgaaactgctcaaaattctgtgcgtgttttacagaaggccgctataacaatactagatggaatttcacagtattcactgagactcattgatgctatgatgttcacatctgatttggctactaacaatctagttgtaatggcctacattacaggtggtgttgttcagttgacttcgcagtggctaactaacatctttggcactgtttatgaaaaactcaaacccgtccttgattggcttgaagagaagtttaaggaaggtgtagagtttcttagagacggttgggaaattgttaaatttatctcaacctgtgcttgtgaaattgtcggtggacaaattgtcacctgtgcaaaggaaattaaggagagtgttcagacattctttaagcttgtaaataaatttttggctttgtgtgctgactctatcattattggtggagctaaacttaaagccttgaatttaggtgaaacatttgtcacgcactcaaagggattgtacagaaagtgtgttaaatccagagaagaaactggcctactcatgcctctaaaagccccaaaagaaattatcttcttagagggagaaacacttcccacagaagtgttaacagaggaagttgtcttgaaaactggtgatttacaaccattagaacaacctactagtgaagctgttgaagctccattggttggtacaccagtttgtattaacgggcttatgttgctcgaaatcaaagacacagaaaagtactgtgcccttgcacctaatatgatggtaacaaacaataccttcacactcaaaggcggtgcaccaacaaaggttacttttggtgatgacactgtgatagaagtgcaaggttacaagagtgtgaatatcacttttgaacttgatgaaaggattgataaagtacttaatgagaagtgctctgcctatacagttgaactcggtacagaagtaaatgagttcgcctgtgttgtggcagatgctgtcataaaaactttgcaaccagtatctgaattacttacaccactgggcattgatttagatgagtggagtatggctacatactacttatttgatgagtctggtgagtttaaattggcttcacatatgtattgttctttttaccctccagatgaggatgaagaagaaggtgattgtgaagaagaagagtttgagccatcaactcaatatgagtatggtactgaagatgattaccaaggtaaacctttggaatttggtgccacttctgctgctcttcaacctgaagaagagcaagaagaagattggttagatgatgatagtcaacaaactgttggtcaacaagacggcagtgaggacaatcagacaactactattcaaacaattgttgaggttcaacctcaattagagatggaacttacaccagttgttcagactattgaagtgaatagttttagtggttatttaaaacttactgacaatgtatacattaaaaatgcagacattgtggaagaagctaaaaaggtaaaaccaacagtggttgttaatgcagccaatgtttaccttaaacatggaggaggtgttgcaggagccttaaataaggctactaacaatgccatgcaagttgaatctgatgattacatagctactaatggaccacttaaagtgggtggtagttgtgttttaagcggacacaatcttgctaaacactgtcttcatgttgtcggcccaaatgttaacaaaggtgaagacattcaacttcttaagagtgcttatgaaaattttaatcagcacgaagttctacttgcaccattattatcagctggtatttttggtgctgaccctatacattctttaagagtttgtgtagatactgttcgcacaaatgtctacttagctgtctttgataaaaatctctatgacaaacttgtttcaagctttttggaaatgaagagtgaaaagcaagttgaacaaaagatcgctgagattcctaaagaggaagttaagccatttataactgaaagtaaaccttcagttgaacagagaaaacaagatgataagaaaatcaaagcttgtgttgaagaagttacaacaactctggaagaaactaagttcctcacagaaaacttgttactttatattgacattaatggcaatcttcatccagattctgccactcttgttagtgacattgacatcactttcttaaagaaagatgctccatatatagtgggtgatgttgttcaagagggtgttttaactgctgtggttatacctactaaaaaggctggtggcactactgaaatgctagcgaaagctttgagaaaagtgccaacagacaattatataaccacttacccgggtcagggtttaaatggttacactgtagaggaggcaaagacagtgcttaaaaagtgtaaaagtgccttttacattctaccatctattatctctaatgagaagcaagaaattcttggaactgtttcttggaatttgcgagaaatgcttgcacatgcagaagaaacacgcaaattaatgcctgtctgtgtggaaactaaagccatagtttcaactatacagcgtaaatataagggtattaaaatacaagagggtgtggttgattatggtgctagattttacttttacaccagtaaaacaactgtagcgtcacttatcaacacacttaacgatctaaatgaaactcttgttacaatgccacttggctatgtaacacatggcttaaatttggaagaagctgctcggtatatgagatctctcaaagtgccagctacagtttctgtttcttcacctgatgctgttacagcgtataatggttatcttacttcttcttctaaaacacctgaagaacattttattgaaaccatctcacttgctggttcctataaagattggtcctattctggacaatctacacaactaggtatagaatttcttaagagaggtgataaaagtgtatattacactagtaatcctaccacattccacctagatggtgaagttatcacctttgacaatcttaagacacttctttctttgagagaagtgaggactattaaggtgtttacaacagtagacaacattaacctccacacgcaagttgtggacatgtcaatgacatatggacaacagtttggtccaacttatttggatggagctgatgttactaaaataaaacctcataattcacatgaaggtaaaacattttatgttttacctaatgatgacactctacgtgttgaggcttttgagtactaccacacaactgatcctagttttctgggtaggtacatgtcagcattaaatcacactaaaaagtggaaatacccacaagttaatggtttaacttctattaaatgggcagataacaactgttatcttgccactgcattgttaacactccaacaaatagagttgaagtttaatccacctgctctacaagatgcttattacagagcaagggctggtgaagctgctaacttttgtgcacttatcttagcctactgtaataagacagtaggtgagttaggtgatgttagagaaacaatgagttacttgtttcaacatgccaatttagattcttgcaaaagagtcttgaacgtggtgtgtaaaacttgtggacaacagcagacaacccttaagggtgtagaagctgttatgtacatgggcacactttcttatgaacaatttaagaaaggtgttcagataccttgtacgtgtggtaaacaagctacaaaatatctagtacaacaggagtcaccttttgttatgatgtcagcaccacctgctcagtatgaacttaagcatggtacatttacttgtgctagtgagtacactggtaattaccagtgtggtcactataaacatataacttctaaagaaactttgtattgcatagacggtgctttacttacaaagtcctcagaatacaaaggtcctattacggatgttttctacaaagaaaacagttacacaacaaccataaaaccagttacttataaattggatggtgttgtttgtacagaaattgaccctaagttggacaattattataagaaagacaattcttatttcacagagcaaccaattgatcttgtaccaaaccaaccatatccaaacgcaagcttcgataattttaagtttgtatgtgataatatcaaatttgctgatgatttaaaccagttaactggttataagaaacctgcttcaagagagcttaaagttacatttttccctgacttaaatggtgatgtggtggctattgattataaacactacacaccctcttttaagaaaggagctaaattgttacataaacctattgtttggcatgttaacaatgcaactaataaagccacgtataaaccaaatacctggtgtatacgttgtctttggagcacaaaaccagttgaaacatcaaattcgtttgatgtactgaagtcagaggacgcgcagggaatggataatcttgcctgcgaagatctaaaaccagtctctgaagaagtagtggaaaatcctaccatacagaaagacgttcttgagtgtaatgtgaaaactaccgaagttgtaggagacattatacttaaaccagcaaataatagtttaaaaattacagaagaggttggccacacagatctaatggctgcttatgtagacaattctagtcttactattaagaaacctaatgaattatctagagtattaggtttgaaaacccttgctactcatggtttagctgctgttaatagtgtcccttgggatactatagctaattatgctaagccttttcttaacaaagttgttagtacaactactaacatagttacacggtgtttaaaccgtgtttgtactaattatatgccttatttctttactttattgctacaattgtgtacttttactagaagtacaaattctagaattaaagcatctatgccgactactatagcaaagaatactgttaagagtgtcggtaaattttgtctagaggcttcatttaattatttgaagtcacctaatttttctaaactgataaatattataatttggtttttactattaagtgtttgcctaggttctttaatctactcaaccgctgctttaggtgttttaatgtctaatttaggcatgccttcttactgtactggttacagagaaggctatttgaactctactaatgtcactattgcaacctactgtactggttctataccttgtagtgtttgtcttagtggtttagattctttagacacctatccttctttagaaactatacaaattaccatttcatcttttaaatgggatttaactgcttttggcttagttgcagagtggtttttggcatatattcttttcactaggtttttctatgtacttggattggctgcaatcatgcaattgtttttcagctattttgcagtacattttattagtaattcttggcttatgtggttaataattaatcttgtacaaatggccccgatttcagctatggttagaatgtacatcttctttgcatcattttattatgtatggaaaagttatgtgcatgttgtagacggttgtaattcatcaacttgtatgatgtgttacaaacgtaatagagcaacaagagtcgaatgtacaactattgttaatggtgttagaaggtccttttatgtctatgctaatggaggtaaaggcttttgcaaactacacaattggaattgtgttaattgtgatacattctgtgctggtagtacatttattagtgatgaagttgcgagagacttgtcactacagtttaaaagaccaataaatcctactgaccagtcttcttacatcgttgatagtgttacagtgaagaatggttccatccatctttactttgataaagctggtcaaaagacttatgaaagacattctctctctcattttgttaacttagacaacctgagagctaataacactaaaggttcattgcctattaatgttatagtttttgatggtaaatcaaaatgtgaagaatcatctgcaaaatcagcgtctgtttactacagtcagcttatgtgtcaacctatactgttactagatcaggcattagtgtctgatgttggtgatagtgcggaagttgcagttaaaatgtttgatgcttacgttaatacgttttcatcaacttttaacgtaccaatggaaaaactcaaaacactagttgcaactgcagaagctgaacttgcaaagaatgtgtccttagacaatgtcttatctacttttatttcagcagctcggcaagggtttgttgattcagatgtagaaactaaagatgttgttgaatgtcttaaattgtcacatcaatctgacatagaagttactggcgatagttgtaataactatatgctcacctataacaaagttgaaaacatgacaccccgtgaccttggtgcttgtattgactgtagtgcgcgtcatattaatgcgcaggtagcaaaaagtcacaacattgctttgatatggaacgttaaagatttcatgtcattgtctgaacaactacgaaaacaaatacgtagtgctgctaaaaagaataacttaccttttaagttgacatgtgcaactactagacaagttgttaatgttgtaacaacaaagatagcacttaagggtggtaaaattgttaataattggttgaagcagttaattaaagttacacttgtgttcctttttgttgctgctattttctatttaataacacctgttcatgtcatgtctaaacatactgacttttcaagtgaaatcataggatacaaggctattgatggtggtgtcactcgtgacatagcatctacagatacttgttttgctaacaaacatgctgattttgacacatggtttagccagcgtggtggtagttatactaatgacaaagcttgcccattgattgctgcagtcataacaagagaagtgggttttgtcgtgcctggtttgcctggcacgatattacgcacaactaatggtgactttttgcatttcttacctagagtttttagtgcagttggtaacatctgttacacaccatcaaaacttatagagtacactgactttgcaacatcagcttgtgttttggctgctgaatgtacaatttttaaagatgcttctggtaagccagtaccatattgttatgataccaatgtactagaaggttctgttgcttatgaaagtttacgccctgacacacgttatgtgctcatggatggctctattattcaatttcctaacacctaccttgaaggttctgttagagtggtaacaacttttgattctgagtactgtaggcacggcacttgtgaaagatcagaagctggtgtttgtgtatctactagtggtagatgggtacttaacaatgattattacagatctttaccaggagttttctgtggtgtagatgctgtaaatttacttactaatatgtttacaccactaattcaacctattggtgctttggacatatcagcatctatagtagctggtggtattgtagctatcgtagtaacatgccttgcctactattttatgaggtttagaagagcttttggtgaatacagtcatgtagttgcctttaatactttactattccttatgtcattcactgtactctgtttaacaccagtttactcattcttacctggtgtttattctgttatttacttgtacttgacattttatcttactaatgatgtttcttttttagcacatattcagtggatggttatgttcacacctttagtacctttctggataacaattgcttatatcatttgtatttccacaaagcatttctattggttctttagtaattacctaaagagacgtgtagtctttaatggtgtttcctttagtacttttgaagaagctgcgctgtgcacctttttgttaaataaagaaatgtatctaaagttgcgtagtgatgtgctattacctcttacgcaatataatagatacttagctctttataataagtacaagtattttagtggagcaatggatacaactagctacagagaagctgcttgttgtcatctcgcaaaggctctcaatgacttcagtaactcaggttctgatgttctttaccaaccaccacaaacctctatcacctcagctgttttgcagagtggttttagaaaaatggcattcccatctggtaaagttgagggttgtatggtacaagtaacttgtggtacaactacacttaacggtctttggcttgatgacgtagtttactgtccaagacatgtgatctgcacctctgaagacatgcttaaccctaattatgaagatttactcattcgtaagtctaatcataatttcttggtacaggctggtaatgttcaactcagggttattggacattctatgcaaaattgtgtacttaagcttaaggttgatacagccaatcctaagacacctaagtataagtttgttcgcattcaaccaggacagactttttcagtgttagcttgttacaatggttcaccatctggtgtttaccaatgtgctatgaggcccaatttcactattaagggttcattccttaatggttcatgtggtagtgttggttttaacatagattatgactgtgtctctttttgttacatgcaccatatggaattaccaactggagttcatgctggcacagacttagaaggtaacttttatggaccttttgttgacaggcaaacagcacaagcagctggtacggacacaactattacagttaatgttttagcttggttgtacgctgctgttataaatggagacaggtggtttctcaatcgatttaccacaactcttaatgactttaaccttgtggctatgaagtacaattatgaacctctaacacaagaccatgttgacatactaggacctctttctgctcaaactggaattgccgttttagatatgtgtgcttcattaaaagaattactgcaaaatggtatgaatggacgtaccatattgggtagtgctttattagaagatgaatttacaccttttgatgttgttagacaatgctcaggtgttactttccaaagtgcagtgaaaagaacaatcaagggtacacaccactggttgttactcacaattttgacttcacttttagttttagtccagagtactcaatggtctttgttcttttttttgtatgaaaatgcctttttaccttttgctatgggtattattgctatgtctgcttttgcaatgatgtttgtcaaacataagcatgcatttctctgtttgtttttgttaccttctcttgccactgtagcttattttaatatggtctatatgcctgctagttgggtgatgcgtattatgacatggttggatatggttgatactagtttgtctggttttaagctaaaagactgtgttatgtatgcatcagctgtagtgttactaatccttatgacagcaagaactgtgtatgatgatggtgctaggagagtgtggacacttatgaatgtcttgacactcgtttataaagtttattatggtaatgctttagatcaagccatttccatgtgggctcttataatctctgttacttctaactactcaggtgtagttacaactgtcatgtttttggccagaggtattgtttttatgtgtgttgagtattgccctattttcttcataactggtaatacacttcagtgtataatgctagtttattgtttcttaggctatttttgtacttgttactttggcctcttttgtttactcaaccgctactttagactgactcttggtgtttatgattacttagtttctacacaggagtttagatatatgaattcacagggactactcccacccaagaatagcatagatgccttcaaactcaacattaaattgttgggtgttggtggcaaaccttgtatcaaagtagccactgtacagtctaaaatgtcagatgtaaagtgcacatcagtagtcttactctcagttttgcaacaactcagagtagaatcatcatctaaattgtgggctcaatgtgtccagttacacaatgacattctcttagctaaagatactactgaagcctttgaaaaaatggtttcactactttctgttttgctttccatgcagggtgctgtagacataaacaagctttgtgaagaaatgctggacaacagggcaaccttacaagctatagcctcagagtttagttcccttccatcatatgcagcttttgctactgctcaagaagcttatgagcaggctgttgctaatggtgattctgaagttgttcttaaaaagttgaagaagtctttgaatgtggctaaatctgaatttgaccgtgatgcagccatgcaacgtaagttggaaaagatggctgatcaagctatgacccaaatgtataaacaggctagatctgaggacaagagggcaaaagttactagtgctatgcagacaatgcttttcactatgcttagaaagttggataatgatgcactcaacaacattatcaacaatgcaagagatggttgtgttcccttgaacataatacctcttacaacagcagccaaactaatggttgtcataccagactataacacatataaaaatacgtgtgatggtacaacatttacttatgcatcagcattgtgggaaatccaacaggttgtagatgcagatagtaaaattgttcaacttagtgaaattagtatggacaattcacctaatttagcatggcctcttattgtaacagctttaagggccaattctgctgtcaaattacagaataatgagcttagtcctgttgcactacgacagatgtcttgtgctgccggtactacacaaactgcttgcactgatgacaatgcgttagcttactacaacacaacaaagggaggtaggtttgtacttgcactgttatccgatttacaggatttgaaatgggctagattccctaagagtgatggaactggtactatctatacagaactggaaccaccttgtaggtttgttacagacacacctaaaggtcctaaagtgaagtatttatactttattaaaggattaaacaacctaaatagaggtatggtacttggtagtttagctgccacagtacgtctacaagctggtaatgcaacagaagtgcctgccaattcaactgtattatctttctgtgcttttgctgtagatgctgctaaagcttacaaagattatctagctagtgggggacaaccaatcactaattgtgttaagatgttgtgtacacacactggtactggtcaggcaataacagttacaccggaagccaatatggatcaagaatcctttggtggtgcatcgtgttgtctgtactgccgttgccacatagatcatccaaatcctaaaggattttgtgacttaaaaggtaagtatgtacaaatacctacaacttgtgctaatgaccctgtgggttttacacttaaaaacacagtctgtaccgtctgcggtatgtggaaaggttatggctgtagttgtgatcaactccgcgaacccatgcttcagtcagctgatgcacaatcgtttttaaacgggtttgcggtgtaagtgcagcccgtcttacaccgtgcggcacaggcactagtactgatgtcgtatacagggcttttgacatctacaatgataaagtagctggttttgctaaattcctaaaaactaattgttgtcgcttccaagaaaaggacgaagatgacaatttaattgattcttactttgtagttaagagacacactttctctaactaccaacatgaagaaacaatttataatttacttaaggattgtccagctgttgctaaacatgacttctttaagtttagaatagacggtgacatggtaccacatatatcacgtcaacgtcttactaaatacacaatggcagacctcgtctatgctttaaggcattttgatgaaggtaattgtgacacattaaaagaaatacttgtcacatacaattgttgtgatgatgattatttcaataaaaaggactggtatgattttgtagaaaacccagatatattacgcgtatacgccaacttaggtgaacgtgtacgccaagctttgttaaaaacagtacaattctgtgatgccatgcgaaatgctggtattgttggtgtactgacattagataatcaagatctcaatggtaactggtatgatttcggtgatttcatacaaaccacgccaggtagtggagttcctgttgtagattcttattattcattgttaatgcctatattaaccttgaccagggctttaactgcagagtcacatgttgacactgacttaacaaagccttacattaagtgggatttgttaaaatatgacttcacggaagagaggttaaaactctttgaccgttattttaaatattgggatcagacataccacccaaattgtgttaactgtttggatgacagatgcattctgcattgtgcaaactttaatgttttattctctacagtgttcccacttacaagttttggaccactagtgagaaaaatatttgttgatggtgttccatttgtagtttcaactggataccacttcagagagctaggtgttgtacataatcaggatgtaaatttacatagctctagacttagttttaaggaattacttgtgtatgctgctgaccctgctatgcacgctgcttctggtaatctattactagataaacgcactacgtgcttttcagtagctgcacttactaacaatgttgcttttcaaactgtcaaacccggtaattttaacaaagacttctatgactttgctgtgtctaagggtttctttaaggaaggaagttctgttgaattaaaacacttcttctttgctcaggatggtaatgctgctatcagcgattatgactactatcgttataatctaccaacaatgtgtgatatcagacaactactatttgtagttgaagttgttgataagtactttgattgttacgatggtggctgtattaatgctaaccaagtcatcgtcaacaacctagacaaatcagctggttttccatttaataaatggggtaaggctagactttattatgattcaatgagttatgaggatcaagatgcacttttcgcatatacaaaacgtaatgtcatccctactataactcaaatgaatcttaagtatgccattagtgcaaagaatagagctcgcaccgtagctggtgtctctatctgtagtactatgaccaatagacagtttcatcaaaaattattgaaatcaatagccgccactagaggagctactgtagtaattggaacaagcaaattctatggtggttggcacaacatgttaaaaactgtttatagtgatgtagaaaaccctcaccttatgggttgggattatcctaaatgtgatagagccatgcctaatatgcttagaattatggcctcacttgttcttgctcgcaaacatacaacgtgttgtagcttgtcacaccgtttctatagattagctaatgagtgtgctcaagtattgagtgaaatggtcatgtgtggcggttcactatatgttaaaccaggtggaacctcatcaggagatgccacaactgcttatgctaatagtgtttttaacatttgtcaagctgtcacggccaatgttaatgcacttttatctactgatggtaacaaaattgccgataagtatgtccgcaatttacaacacagactttatgagtgtctctatagaaatagagatgttgacacagactttgtgaatgagttttacgcatatttgcgtaaacatttctcaatgatgatactctctgacgatgctgttgtgtgtttcaatagcacttatgcatctcaaggtctagtggctagcataaagaactttaagtcagttctttattatcaaaacaatgtttttatgtctgaagcaaaatgttggactgagactgaccttactaaaggacctcatgaattttgctctcaacatacaatgctagttaaacagggtgatgattatgtgtaccttccttacccagatccatcaagaatcctaggggccggctgttttgtagatgatatcgtaaaaacagatggtacacttatgattgaacggttcgtgtctttagctatagatgcttacccacttactaaacatcctaatcaggagtatgctgatgtctttcatttgtacttacaatacataagaaagctacatgatgagttaacaggacacatgttagacatgtattctgttatgcttactaatgataacacttcaaggtattgggaacctgagttttatgaggctatgtacacaccgcatacagtcttacaggctgttggggcttgtgttctttgcaattcacagacttcattaagatgtggtgcttgcatacgtagaccattcttatgttgtaaatgctgttacgaccatgtcatatcaacatcacataaattagtcttgtctgttaatccgtatgtttgcaatgctccaggttgtgatgtcacagatgtgactcaactttacttaggaggtatgagctattattgtaaatcacataaaccacccattagttttccattgtgtgctaatggacaagtttttggtttatataaaaatacatgtgttggtagcgataatgttactgactttaatgcaattgcaacatgtgactggacaaatgctggtgattacattttagctaacacctgtactgaaagactcaagctttttgcagcagaaacgctcaaagctactgaggagacatttaaactgtcttatggtattgctactgtacgtgaagtgctgtctgacagagaattacatctttcatgggaagttggtaaacctagaccaccacttaaccgaaattatgtctttactggttatcgtgtaactaaaaacagtaaagtacaaataggagagtacacctttgaaaaaggtgactatggtgatgctgttgtttaccgaggtacaacaacttacaaattaaatgttggtgattattttgtgctgacatcacatacagtaatgccattaagtgcacctacactagtgccacaagagcactatgttagaattactggcttatacccaacactcaatatctcagatgagttttctagcaatgttgcaaattatcaaaaggttggtatgcaaaagtattctacactccagggaccacctggtactggtaagagtcattttgctattggcctagctctctactacccttctgctcgcatagtgtatacagcttgctctcatgccgctgttgatgcactatgtgagaaggcattaaaatatttgcctatagataaatgtagtagaattatacctgcacgtgctcgtgtagagtgttttgataaattcaaagtgaattcaacattagaacagtatgtcttttgtactgtaaatgcattgcctgagacgacagcagatatagttgtctttgatgaaatttcaatggccacaaattatgatttgagtgttgtcaatgccagattacgtgctaagcactatgtgtacattggcgaccctgctcaattacctgcaccacgcacattgctaactaagggcacactagaaccagaatatttcaattcagtgtgtagacttatgaaaactataggtccagacatgttcctcggaacttgtcggcgttgtcctgctgaaattgttgacactgtgagtgctttggtttatgataataagcttaaagcacataaagacaaatcagctcaatgctttaaaatgttttataagggtgttatcacgcatgatgtttcatctgcaattaacaggccacaaataggcgtggtaagagaattccttacacgtaaccctgcttggagaaaagctgtctttatttcaccttataattcacagaatgctgtagcctcaaagattttgggactaccaactcaaactgttgattcatcacagggctcagaatatgactatgtcatattcactcaaaccactgaaacagctcactcttgtaatgtaaacagatttaatgttgctattaccagagcaaaagtaggcatactttgcataatgtctgatagagacctttatgacaagttgcaatttacaagtcttgaaattccacgtaggaatgtggcaactttacaagctgaaaatgtaacaggactctttaaagattgtagtaaggtaatcactgggttacatcctacacaggcacctacacacctcagtgttgacactaaattcaaaactgaaggtttatgtgttgacatacctggcatacctaaggacatgacctatagaagactcatctctatgatgggttttaaaatgaattatcaagttaatggttaccctaacatgtttatcacccgcgaagaagctataagacatgtacgtgcatggattggcttcgatgtcgaggggtgtcatgctactagagaagctgttggtaccaatttacctttacagctaggtttttctacaggtgttaacctagttgctgtacctacaggttatgttgatacacctaataatacagatttttccagagttagtgctaaaccaccgcctggagatcaatttaaacacctcataccacttatgtacaaaggacttccttggaatgtagtgcgtataaagattgtacaaatgttaagtgacacacttaaaaatctctctgacagagtcgtatttgtcttatgggcacatggctttgagttgacatctatgaagtattttgtgaaaataggacctgagcgcacctgttgtctatgtgatagacgtgccacatgcttttccactgcttcagacacttatgcctgttggcatcattctattggatttgattacgtctataatccgtttatgattgatgttcaacaatggggttttacaggtaacctacaaagcaaccatgatctgtattgtcaagtccatggtaatgcacatgtagctagttgtgatgcaatcatgactaggtgtctagctgtccacgagtgctttgttaagcgtgttgactggactattgaatatcctataattggtgatgaactgaagattaatgcggcttgtagaaaggttcaacacatggttgttaaagctgcattattagcagacaaattcccagttcttcacgacattggtaaccctaaagctattaagtgtgtacctcaagctgatgtagaatggaagttctatgatgcacagccttgtagtgacaaagcttataaaatagaagaattattctattcttatgccacacattctgacaaattcacagatggtgtatgcctattttggaattgcaatgtcgatagatatcctgctaattccattgtttgtagatttgacactagagtgctatctaaccttaacttgcctggttgtgatggtggcagtttgtatgtaaataaacatgcattccacacaccagcttttgataaaagtgcttttgttaatttaaaacaattaccatttttctattactctgacagtccatgtgagtctcatggaaaacaagtagtgtcagatatagattatgtaccactaaagtctgctacgtgtataacacgttgcaatttaggtggtgctgtctgtagacatcatgctaatgagtacagattgtatctcgatgcttataacatgatgatctcagctggctttagcttgtgggtttacaaacaatttgatacttataacctctggaacacttttacaagacttcagagtttagaaaatgtggcttttaatgttgtaaataagggacactttgatggacaacagggtgaagtaccagtttctatcattaataacactgtttacacaaaagttgatggtgttgatgtagaattgtttgaaaataaaacaacattacctgttaatgtagcatttgagctttgggctaagcgcaacattaaaccagtaccagaggtgaaaatactcaataatttgggtgtggacattgctgctaatactgtgatctgggactacaaaagagatgctccagcacatatatctactattggtgtttgttctatgactgacatagccaagaaaccaactgaaacgatttgtgcaccactcactgtcttttttgatggtagagttgatggtcaagtagacttatttagaaatgcccgtaatggtgttcttattacagaaggtagtgttaaaggtttacaaccatctgtaggtcccaaacaagctagtcttaatggagtcacattaattggagaagccgtaaaaacacagttcaattattataagaaagttgatggtgttgtccaacaattacctgaaacttactttactcagagtagaaatttacaagaatttaaacccaggagtcaaatggaaattgatttcttagaattagctatggatgaattcattgaacggtataaattagaaggctatgccttcgaacatatcgtttatggagattttagtcatagtcagttaggtggtttacatctactgattggactagctaaacgttttaaggaatcaccttttgaattagaagattttattcctatggacagtacagttaaaaactatttcataacagatgcgcaaacaggttcatctaagtgtgtgtgttctgttattgatttattacttgatgattttgttgaaataataaaatcccaagatttatctgtagtttctaaggttgtcaaagtgactattgactatacagaaatttcatttatgctttggtgtaaagatggccatgtagaaacattttacccaaaattacaatctagtcaagcgtggcaaccgggtgttgctatgcctaatctttacaaaatgcaaagaatgctattagaaaagtgtgaccttcaaaattatggtgatagtgcaacattacctaaaggcataatgatgaatgtcgcaaaatatactcaactgtgtcaatatttaaacacattaacattagctgtaccctataatatgagagttatacattttggtgctggttctgataaaggagttgcaccaggtacagctgttttaagacagtggttgcctacgggtacgctgcttgtcgactcagatcttaatgactttgtctctgatgcagattcaactttgattggtgattgtgcaactgtacatacagctaataaatgggatctcattattagtgatatgtacgaccctaagactaaaaatgttacaaaagaaaatgactctaaagagggttttttcacttacatttgtgggtttatacaacaaaagctagctcttggaggttccgtggctataaagataacagaacattcttggaatgctgatctttataagctcatgggacacttcgcatggtggacagcctttgttactaatgtgaatgcgtcatcatctgaagcatttttaattggatgtaattatcttggcaaaccacgcgaacaaatagatggttatgtcatgcatgcaaattacatattttggaggaatacaaatccaattcagttgtcttcctattctttatttgacatgagtaaatttccccttaaattaaggggtactgctgttatgtctttaaaagaaggtcaaatcaatgatatgattttatctcttcttagtaaaggtagacttataattagagaaaacaacagagttgttatttctagtgatgttcttgttaacaactaaacgaacaatgtttgtttttcttgttttattgccactagtctctagtcagtgtgttaatcttacaaccagaactcaattaccccctgcatacactaattctttcacacgtggtgtttattaccctgacaaagttttcagatcctcagttttacattcaactcaggacttgttcttacctttcttttccaatgttacttggttccatgctatacatgtctctgggaccaatggtactaagaggtttgataaccctgtcctaccatttaatgatggtgtttattttgcttccactgagaagtctaacataataagaggctggatttttggtactactttagattcgaagacccagtccctacttattgttaataacgctactaatgttgttattaaagtctgtgaatttcaattttgtaatgatccatttttgggtgtttattaccacaaaaacaacaaaagttggatggaaagtgagttcagagtttattctagtgcgaataattgcacttttgaatatgtctctcagccttttcttatggaccttgaaggaaaacagggtaatttcaaaaatcttagggaatttgtgtttaagaatattgatggttattttaaaatatattctaagcacacgcctattaatttagtgcgtgatctccctcagggtttttcggctttagaaccattggtagatttgccaataggtattaacatcactaggtttcaaactttacttgctttacatagaagttatttgactcctggtgattcttcttcaggttggacagctggtgctgcagcttattatgtgggttatcttcaacctaggacttttctattaaaatataatgaaaatggaaccattacagatgctgtagactgtgcacttgaccctctctcagaaacaaagtgtacgttgaaatccttcactgtagaaaaaggaatctatcaaacttctaactttagagtccaaccaacagaatctattgttagatttcctaatattacaaacttgtgcccttttggtgaagtttttaacgccaccagatttgcatctgtttatgcttggaacaggaagagaatcagcaactgtgttgctgattattctgtcctatataattccgcatcattttccacttttaagtgttatggagtgtctcctactaaattaaatgatctctgctttactaatgtctatgcagattcatttgtaattagaggtgatgaagtcagacaaatcgctccagggcaaactggaaagattgctgattataattataaattaccagatgattttacaggctgcgttatagcttggaattctaacaatcttgattctaaggttggtggtaattataattacctgtatagattgtttaggaagtctaatctcaaaccttttgagagagatatttcaactgaaatctatcaggccggtagcacaccttgtaatggtgttgaaggttttaattgttactttcctttacaatcatatggtttccaacccactaatggtgttggttaccaaccatacagagtagtagtactttcttttgaacttctacatgcaccagcaactgtttgtggacctaaaaagtctactaatttggttaaaaacaaatgtgtcaatttcaacttcaatggtttaacaggcacaggtgttcttactgagtctaacaaaaagtttctgcctttccaacaatttggcagagacattgctgacactactgatgctgtccgtgatccacagacacttgagattcttgacattacaccatgttcttttggtggtgtcagtgttataacaccaggaacaaatacttctaaccaggttgctgttctttatcagggtgttaactgcacagaagtccctgttgctattcatgcagatcaacttactcctacttggcgtgtttattctacaggttctaatgtttttcaaacacgtgcaggctgtttaataggggctgaacatgtcaacaactcatatgagtgtgacatacccattggtgcaggtatatgcgctagttatcagactcagactaattctcctcggcgggcacgtagtgtagctagtcaatccatcattgcctacactatgtcacttggtgcagaaaattcagttgcttactctaataactctattgccatacccacaaattttactattagtgttaccacagaaattctaccagtgtctatgaccaagacatcagtagattgtacaatgtacatttgtggtgattcaactgaatgcagcaatcttttgttgcaatatggcagtttttgtacacaattaaaccgtgctttaactggaatagctgttgaacaagacaaaaacacccaagaagtttttgcacaagtcaaacaaatttacaaaacaccaccaattaaagattttggtggttttaatttttcacaaatattaccagatccatcaaaaccaagcaagaggtcatttattgaagatctacttttcaacaaagtgacacttgcagatgctggcttcatcaaacaatatggtgattgccttggtgatattgctgctagagacctcatttgtgcacaaaagtttaacggccttactgttttgccacctttgctcacagatgaaatgattgctcaatacacttctgcactgttagcgggtacaatcacttctggttggacctttggtgcaggtgctgcattacaaataccatttgctatgcaaatggcttataggtttaatggtattggagttacacagaatgttctctatgagaaccaaaaattgattgccaaccaatttaatagtgctattggcaaaattcaagactcactttcttccacagcaagtgcacttggaaaacttcaagatgtggtcaaccaaaatgcacaagctttaaacacgcttgttaaacaacttagctccaattttggtgcaatttcaagtgttttaaatgatatcctttcacgtcttgacaaagttgaggctgaagtgcaaattgataggttgatcacaggcagacttcaaagtttgcagacatatgtgactcaacaattaattagagctgcagaaatcagagcttctgctaatcttgctgctactaaaatgtcagagtgtgtacttggacaatcaaaaagagttgatttttgtggaaagggctatcatcttatgtccttccctcagtcagcacctcatggtgtagtcttcttgcatgtgacttatgtccctgcacaagaaaagaacttcacaactgctcctgccatttgtcatgatggaaaagcacactttcctcgtgaaggtgtctttgtttcaaatggcacacactggtttgtaacacaaaggaatttttatgaaccacaaatcattactacagacaacacatttgtgtctggtaactgtgatgttgtaataggaattgtcaacaacacagtttatgatcctttgcaacctgaattagactcattcaaggaggagttagataaatattttaagaatcatacatcaccagatgttgatttaggtgacatctctggcattaatgcttcagttgtaaacattcaaaaagaaattgaccgcctcaatgaggttgccaagaatttaaatgaatctctcatcgatctccaagaacttggaaagtatgagcagtatataaaatggccatggtacatttggctaggttttatagctggcttgattgccatagtaatggtgacaattatgctttgctgtatgaccagttgctgtagttgtctcaagggctgttgttcttgtggatcctgctgcaaatttgatgannnngantctgagccagtgctcaaaggagtcaaattacattacacataaacgaacttatggatttgtttatgagaatcttcacaattggaactgtaactttgaagcaaggtnnnnnnnnnnnnnnnnnnnnnnnnnnnnnnnnnnnnnnnnctgcaacgataccgatacaagcctcactccctttcggatggcttattgttggcgttgcacttcttgctgtttttcagagcgcttccaaaatcataaccctcaaaaagagatggcaactagcactctccaagggtgttcactttgtttgcaacttgctgttgttgtttgtaacagtttactcacaccttttgctcgttgctgctggccttgaagccccttttctctatctttatgctttagtctacttcttgcagagtataaactttgtaagaataataatgaggctttggctttgctggaaatgccgttccaaaaacccattactttatgatgccaactattttctttgctggcatactaattgttacgactattgtataccttacaatagtgtaacttcttcaattgtcattacttcaggtgatggcacaacaagtcctatttctgaacatgactaccagattggtggttatactgaaaaatgggaatctggagtaaaagactgtgttgtattacacagttacttcacttcagactattaccagctgtactcaactcaattgagtacagacactggtgttgaacatgttaccttcttcatctacaataaaattgttgatgagcctgaagaacatgtccaaattcacacaatcgacggttcatccggagttgttaatccagtaatggaaccaatttatgatgaaccgacgacgactactagcgtgcctttgtaagcacaagctgatgagtacgaacttatgtactcattcgtttcggaagagacaggtacgttaatagttaatagcgtacttctttttcttgctttcgtggtattcttgctagttacactagccatccttactgcgcttcgattgtgtgcgtactgctgcaatattgttaacgtgagtcttgtaaaaccttctttttacgtttactctcgtgttaaaaatctgaattcttctagagttcctgatcttccggtctaaacgaactaaatattatattagtttttctgtttggaactttaattttagccatggcagattccaacggtactattaccgttgaagagcttaaaaagctccttgaacaatggaacctagtaataggtttcctattccttacatggatttgtcttctacaatttgcctatgccaacaggaataggtttttgtatataattaagttaattttcctctggctgttatggccagtaactttagcttgttttgtgcttgctgctgtttacagaataaattggatcaccggtggaattgctatcgcaatggcttgtcttgtaggcttgatgtggctcagctacttcattgcttctttcagactgtttgcgcgtacgcgttccatgtggtcattcaatccagaaactaacattcttctcaacgtgccactccatggcactattctgaccagaccgcttctagaaagtgaactcgtaatcggagctgtgatccttcgtggacatcttcgtattgctggacaccatctaggacgctgtgacatcaaggacctgcctaaagaaatcactgttgctacatcacgaacgctttcttattacaaattgggagcttcgcagcgtgtagcaggtgactcaggttttgctgcatacagtcgctacaggattggcaactataaattaaacacagaccattccagtagcagtgacaatattgctttgcttgtacagtaagtgacaacagatgtttcatctcgttgactttcaggttactatagcagagatattactaattattatgaggacttttaaagtttccatttggaatcttgattacatcataaacctcataattaaaaatttatctaagtcactaactgagaataaatattctcaattagatgaagagcaaccaatggagattgattaaacgaacatgaaaattattcttttcttggcactgataacactcgctacttgtgagctttatcactaccaagagtgtgttagaggtacaacagtacttttaaaagaaccttgctcttctggaacatacgagggcaattcaccatttcatcctctagctgataacaaatttgcactgacttgctttagcactcaatttgcttttgcttgtcctgacggcgtaaaacacgtctatcagttacgtgccagatcagtttcacctaaactgttcatcagacaagaggaagttcaagaactttactctccaatttttcttattgttgcggcaatagtgtttataacactttgcttcacactcaaaagaaagacagaatgattgaactttcattaattgacttctatttgtgctttttagcctttctgctattccttgttttaattatgcttattatcttttggttctcacttgaactgcaagatcataatgaaacttgtcacgcctaaacgaacatgaaatttcttgttttcttaggaatcatcacaactgtagctgcatttcaccaagaatgtagtttacagtcatgtactcaacatcaaccatatgtagttgatgacccgtgtcctattcacttctattctaaatggtatattagagtaggagctagaaaatcagcacctttaattgaattgtgcgtggatgaggctggttctaaatcacccattcagtacatcgatatcggtaattatacagtttcctgtttaccttttacaattaattgccaggaacctaaattgggtagtcttgtagtgcgttgttcgttctatgaagactttttagagtatcatgacgttcgtgttgttttagatttcatctaaacgaacaaactaaaatgtctgataatggaccccaaaatcagcgaaatgcaccccgcattacgtttggtggaccctcagattcaactggcagtaaccagaatggagaacgcagtggggcgcgatcaaaacaacgtcggccccaaggtttacccaataatactgcgtcttggttcaccgctctcactcaacatggcaaggaagaccttaaattccctcgaggacaaggcgttccaattaacaccaatagcagtccagatgaccaaattggctactaccgaagagctaccagacgaattcgtggtggtgacggtaaaatgaaagatctcagtccaagatggtatttctactacctaggaactgggccagaagctggacttccctatggtgctaacaaagacggcatcatatgggttgcaactgagggagccttgaatacaccaaaagatcacattggcacccgcaatcctgctaacaatgctgcaatcgtgctacaacttcctcaaggaacaacattgccaaaaggcttctacgcagaagggagcagaggcggcagtcaagcctcttctcgttcctcatcacgtagtcgcaacagttcaagaaattcaactccaggcagcagtaggggaacttctcctgctagaatggctggcaatggcggtgatgctgctcttgctttgctgctgcttgacagattgaaccagcttgagagcaaaatgtctggtaaaggccaacaacaacaaggccaaactgtcactaagaaatctgctgctgaggcttctaagaagcctcggcaaaaacgtactgccactaaagcatacaatgtaacacaagctttcggcagacgtggtccagaacaaacccaaggaaattttggggaccaggaactaatcagacaaggaactgattacaaacattggccgcaaattgcacaatttgcccccagcgcttcagcgttcttcggaatgtcgcgcattggcatggaagtcacaccttcgggaacgtggttgacctacacaggtgccatcaaattggatgacaaagatccaaatttcaaagatcaagtcattttgctgaataagcatattgacgcatacaaaacattcccaccaacagagcctaaaaaggacaaaaagaagaaggctgatgaaactcaagccttaccgcagagacagaagaaacagcaaactgtgactcttcttcctgctgcagatttggatgatttctccaaacaattgcaacaatccatgagcagtgctgactcaactcaggcctaaactcatgcagaccacacaaggcagatgggctatataaacgttttcgcttttccgtttacgatatatagtctactcttgtgcagaatgaattctcgtaactacatagcacaagtagatgtagttaactttaatctcacatagcaatctttaatcagtgtgtaacattagggaggacttgaaagagccaccacattttcaccgaggccacgcggagtacgatcgagtgtacagtgaacaatgctagggagagctgcctatatggaagagccctaatgtgtaaaattaattttagtagtgctatccccatgtga

SEQ ID NO: 50 - DNA, 29805 bp, synthetic construct
  misc_feature 1..29805: note = Reconstituted virus 13
  source 1..29805: mol_type = other DNA
actttcgatctcttgtagatctgttctctaaacgaactttaaaatctgtgtggctgtcactcggctgcatgcttagtgcactcacgcagtataattaataactaattactgtcgttgacaggacacgagtaactcgtctatcttctgcaggctgcttacggtttcgtccgtgttgcagccgatcatcagcacatctaggttttgtccgggtgtgaccgaaaggtaagatggagagccttgtccctggtttcaacgagaaaacacacgtccaactcagtttgcctgttttacaggttcgcgacgtgctcgtacgtggctttggagactccgtggaggaggtcttatcagaggcacgtcaacatcttaaagatggcacttgtggcttagtagaagttgaaaaaggcgttttgcctcaacttgaacagccctatgtgttcatcaaacgttcggatgctcgaactgcacctcatggtcatgttatggttgagctggtagcagaactcgaaggcattcagtacggtcgtagtggtgagacacttggtgtccttgtccctcatgtgggcgaaataccagtggcttaccgcaaggttcttcttcgtaagaacggtaataaaggagctggtggccatagttacggcgccgatctaaagtcatttgacttaggcgacgagcttggcactgatccttatgaagattttcaagaaaactggaacactaaacatagcagtggtgttacccgtgaactcatgcgtgagcttaacggaggggcatacactcgctatgtcgataacaacttctgtggccctgatggctaccctcttgagtgcattaaagaccttctagcacgtgctggtaaagcttcatgcactttgtccgaacaactggactttattgacactaagaggggtgtatactgctgccgtgaacatgagcatgaaattgcttggtacacggaacgttctgaaaagagctatgaattgcagacaccttttgaaattaaattggcaaagaaatttgacaccttcaatggggaatgtccaaattttgtatttcccttaaattccataatcaagactattcaaccaagggttgaaaagaaaaagcttgatggctttatgggtagaattcgatctgtctatccagttgcgtcaccaaatgaatgcaaccaaatgtgcctttcaactctcatgaagtgtgatcattgtggtgaaacttcatggcagacgggcgattttgttaaagccacttgcgaattttgtggcactgagaatttgactaaagaaggtgccactacttgtggttacttaccccaaaatgctgttgttaaaatttattgtccagcatgtcacaattcagaagtaggacctgagcatagtcttgccgaataccataatgaatctggcttgaaaaccattcttcgtaagggtggtcgcactattgcctttggaggctgtgtgttctcttatgttggttgccataacaagtgtgcctattgggttccacgtgctagcgctaacataggttgtaaccatacaggtgttgttggagaaggttccgaaggtcttaatgacaaccttcttgaaatactccaaaaagagaaagtcaacatcaatattgttggtgactttaaacttaatgaagagatcgccattattttggcatctttttctgcttccacaagtgcttttgtggaaactgtgaaaggtttggattataaagcattcaaacaaattgttgaatcctgtggtaattttaaagttacaaaaggaaaagctaaaaaaggtgcctggaatattggtgaacagaaatcaatactgagtcctctttatgcatttgcatcagaggctgctcgtgttgtacgatcaattttctcccgcactcttgaaactgctcaaaattctgtgcgtgttttacagaaggccgctataacaatactagatggaatttcacagtattcactgagactcattgatgctatgatgttcacatctgatttggctactaacaatctagttgtaatggcctacattacaggtggtgttgttcagttgacttcgcagtggctaactaacatctttggcactgtttatgaaaaactcaaacccgtccttgattggcttgaagagaagtttaaggaaggtgtagagtttcttagagacggttgggaaattgttaaatttatctcaacctgtgcttgtgaaattgtcggtggacaaattgtcacctgtgcaaaggaaattaaggagagtgttcagacattctttaagcttgtaaataaatttttggctttgtgtgctgactctatcattattggtggagctaaacttaaagccttgaatttaggtgaaacatttgtcacgcactcaaagggattgtacagaaagtgtgttaaatccagagaagaaactggcctactcatgcctctaaaagccccaaaagaaattatcttcttagagggagaaacacttcccacagaagtgttaacagaggaagttgtcttgaaaactggtgatttacaaccattagaacaacctactagtgaagctgttgaagctccattggttggtacaccagtttgtattaacgggcttatgttgctcgaaatcaaagacacagaaaagtactgtgcccttgcacctaatatgatggtaacaaacaataccttcacactcaaaggcggtgcaccaacaaaggttacttttggtgatgacactgtgatagaagtgcaaggttacaagagtgtgaatatcacttttgaacttgatgaaaggattgataaagtacttaatgagaagtgctctgcctatacagttgaactcggtacagaagtaaatgagttcgcctgtgttgtggcagatgctgtcataaaaactttgcaaccagtatctgaattacttacaccactgggcattgatttagatgagtggagtatggctacatactacttatttgatgagtctggtgagtttaaattggcttcacatatgtattgttctttttaccctccagatgaggatgaagaagaaggtgattgtgaagaagaagagtttgagccatcaactcaatatgagtatggtactgaagatgattaccaaggtaaacctttggaatttggtgccacttctgctgctcttcaacctgaagaagagcaagaagaagattggttagatgatgatagtcaacaaactgttggtcaacaagacggcagtgaggacaatcagacaactactattcaaacaattgttgaggttcaacctcaattagagatggaacttacaccagttgttcagactattgaagtgaatagttttagtggttatttaaaacttactgacaatgtatacattaaaaatgcagacattgtggaagaagctaaaaaggtaaaaccaacagtggttgttaatgcagccaatgtttaccttaaacatggaggaggtgttgcaggagccttaaataaggctactaacaatgccatgcaagttgaatctgatgattacatagctactaatggaccacttaaagtgggtggtagttgtgttttaagcggacacaatcttgctaaacactgtcttcatgttgtcggcccaaatgttaacaaaggtgaagacattcaacttcttaagagtgcttatgaaaattttaatcagcacgaagttctacttgcaccattattatcagctggtatttttggtgctgaccctatacattctttaagagtttgtgtagatactgttcgcacaaatgtctacttagctgtctttgataaaaatctctatgacaaacttgtttcaagctttttggaaatgaagagtgaaaagcaagttgaacaaaagatcgctgagattcctaaagaggaagttaagccatttataactgaaagtaaaccttcagttgaacagagaaaacaagatgataagaaaatcaaagcttgtgttgaagaagttacaacaactctggaagaaactaagttcctcacagaaaacttgttactttatattgacattaatggcaatcttcatccagattctgccactcttgttagtgacattgacatcactttcttaaagaaagatgctccatatatagtgggtgatgttgttcaagagggtgttttaactgctgtggttatacctactaaaaaggctggtggcactactgaaatgctagcgaaagctttgagaaaagtgccaacagacaattatataaccacttacccgggtcagggtttaaatggttacactgtagaggaggcaaagacagtgcttaaaaagtgtaaaagtgccttttacattctaccatctattatctctaatgagaagcaagaaattcttggaactgtttcttggaatttgcgagaaatgcttgcacatgcagaagaaacacgcaaattaatgcctgtctgtgtggaaactaaagccatagtttcaactatacagcgtaaatataagggtattaaaatacaagagggtgtggttgattatggtgctagattttacttttacaccagtaaaacaactgtagcgtcacttatcaacacacttaacgatctaaatgaaactcttgttacaatgccacttggctatgtaacacatggcttaaatttggaagaagctgctcggtatatgagatctctcaaagtgccagctacagtttctgtttcttcacctgatgctgttacagcgtataatggttatcttacttcttcttctaaaacacctgaagaacattttattgaaaccatctcacttgctggttcctataaagattggtcctattctggacaatctacacaactaggtatagaatttcttaagagaggtgataaaagtgtatattacactagtaatcctaccacattccacctagatggtgaagttatcacctttgacaatcttaagacacttctttctttgagagaagtgaggactattaaggtgtttacaacagtagacaacattaacctccacacgcaagttgtggacatgtcaatgacatatggacaacagtttggtccaacttatttggatggagctgatgttactaaaataaaacctcataattcacatgaaggtaaaacattttatgttttacctaatgatgacactctacgtgttgaggcttttgagtactaccacacaactgatcctagttttctgggtaggtacatgtcagcattaaatcacactaaaaagtggaaatacccacaagttaatggtttaacttctattaaatgggcagataacaactgttatcttgccactgcattgttaacactccaacaaatagagttgaagtttaatccacctgctctacaagatgcttattacagagcaagggctggtgaagctgctaacttttgtgcacttatcttagcctactgtaataagacagtaggtgagttaggtgatgttagagaaacaatgagttacttgtttcaacatgccaatttagattcttgcaaaagagtcttgaacgtggtgtgtaaaacttgtggacaacagcagacaacccttaagggtgtagaagctgttatgtacatgggcacactttcttatgaacaatttaagaaaggtgttcagataccttgtacgtgtggtaaacaagctacaaaatatctagtacaacaggagtcaccttttgttatgatgtcagcaccacctgctcagtatgaacttaagcatggtacatttacttgtgctagtgagtacactggtaattaccagtgtggtcactataaacatataacttctaaagaaactttgtattgcatagacggtgctttacttacaaagtcctcagaatacaaaggtcctattacggatgttttctacaaagaaaacagttacacaacaaccataaaaccagttacttataaattggatggtgttgtttgtacagaaattgaccctaagttggacaattattataagaaagacaattcttatttcacagagcaaccaattgatcttgtaccaaaccaaccatatccaaacgcaagcttcgataattttaagtttgtatgtgataatatcaaatttgctgatgatttaaaccagttaactggttataagaaacctgcttcaagagagcttaaagttacatttttccctgacttaaatggtgatgtggtggctattgattataaacactacacaccctcttttaagaaaggagctaaattgttacataaacctattgtttggcatgttaacaatgcaactaataaagccacgtataaaccaaatacctggtgtatacgttgtctttggagcacaaaaccagttgaaacatcaaattcgtttgatgtactgaagtcagaggacgcgcagggaatggataatcttgcctgcgaagatctaaaaccagtctctgaagaagtagtggaaaatcctaccatacagaaagacgttcttgagtgtaatgtgaaaactaccgaagttgtaggagacattatacttaaaccagcaaataatagtttaaaaattacagaagaggttggccacacagatctaatggctgcttatgtagacaattctagtcttactattaagaaacctaatgaattatctagagtattaggtttgaaaacccttgctactcatggtttagctgctgttaatagtgtcccttgggatactatagctaattatgctaagccttttcttaacaaagttgttagtacaactactaacatagttacacggtgtttaaaccgtgtttgtactaattatatgccttatttctttactttattgctacaattgtgtacttttactagaagtacaaattctagaattaaagcatctatgccgactactatagcaaagaatactgttaagagtgtcggtaaattttgtctagaggcttcatttaattatttgaagtcacctaatttttctaaactgataaatattataatttggtttttactattaagtgtttgcctaggttctttaatctactcaaccgctgctttaggtgttttaatgtctaatttaggcatgccttcttactgtactggttacagagaaggctatttgaactctactaatgtcactattgcaacctactgtactggttctataccttgtagtgtttgtcttagtggtttagattctttagacacctatccttctttagaaactatacaaattaccatttcatcttttaaatgggatttaactgcttttggcttagttgcagagtggtttttggcatatattcttttcactaggtttttctatgtacttggattggctgcaatcatgcaattgtttttcagctattttgcagtacattttattagtaattcttggcttatgtggttaataattaatcttgtacaaatggccccgatttcagctatggttagaatgtacatcttctttgcatcattttattatgtatggaaaagttatgtgcatgttgtagacggttgtaattcatcaacttgtatgatgtgttacaaacgtaatagagcaacaagagtcgaatgtacaactattgttaatggtgttagaaggtccttttatgtctatgctaatggaggtaaaggcttttgcaaactacacaattggaattgtgttaattgtgatacattctgtgctggtagtacatttattagtgatgaagttgcgagagacttgtcactacagtttaaaagaccaataaatcctactgaccagtcttcttacatcgttgatagtgttacagtgaagaatggttccatccatctttactttgataaagctggtcaaaagacttatgaaagacattctctctctcattttgttaacttagacaacctgagagctaataacactaaaggttcattgcctattaatgttatagtttttgatggtaaatcaaaatgtgaagaatcatctgcaaaatcagcgtctgtttactacagtcagcttatgtgtcaacctatactgttactagatcaggcattagtgtctgatgttggtgatagtgcggaagttgcagttaaaatgtttgatgcttacgttaatacgttttcatcaacttttaacgtaccaatggaaaaactcaaaacactagttgcaactgcagaagctgaacttgcaaagaatgtgtccttagacaatgtcttatctacttttatttcagcagctcggcaagggtttgttgattcagatgtagaaactaaagatgttgttgaatgtcttaaattgtcacatcaatctgacatagaagttactggcgatagttgtaataactatatgctcacctataacaaagttgaaaacatgacaccccgtgaccttggtgcttgtattgactgtagtgcgcgtcatattaatgcgcaggtagcaaaaagtcacaacattgctttgatatggaacgttaaagatttcatgtcattgtctgaacaactacgaaaacaaatacgtagtgctgctaaaaagaataacttaccttttaagttgacatgtgcaactactagacaagttgttaatgttgtaacaacaaagatagcacttaagggtggtaaaattgttaataattggttgaagcagttaattaaagttacacttgtgttcctttttgttgctgctattttctatttaataacacctgttcatgtcatgtctaaacatactgacttttcaagtgaaatcataggatacaaggctattgatggtggtgtcactcgtgacatagcatctacagatacttgttttgctaacaaacatgctgattttgacacatggtttagccagcgtggtggtagttatactaatgacaaagcttgcccattgattgctgcagtcataacaagagaagtgggttttgtcgtgcctggtttgcctggcacgatattacgcacaactaatggtgactttttgcatttcttacctagagtttttagtgcagttggtaacatctgttacacaccatcaaaacttatagagtacactgactttgcaacatcagcttgtgttttggctgctgaatgtacaatttttaaagatgcttctggtaagccagtaccatattgttatgataccaatgtactagaaggttctgttgcttatgaaagtttacgccctgacacacgttatgtgctcatggatggctctattattcaatttcctaacacctaccttgaaggttctgttagagtggtaacaacttttgattctgagtactgtaggcacggcacttgtgaaagatcagaagctggtgtttgtgtatctactagtggtagatgggtacttaacaatgattattacagatctttaccaggagttttctgtggtgtagatgctgtaaatttacttactaatatgtttacaccactaattcaacctattggtgctttggacatatcagcatctatagtagctggtggtattgtagctatcgtagtaacatgccttgcctactattttatgaggtttagaagagcttttggtgaatacagtcatgtagttgcctttaatactttactattccttatgtcattcactgtactctgtttaacaccagtttactcattcttacctggtgtttattctgttatttacttgtacttgacattttatcttactaatgatgtttcttttttagcacatattcagtggatggttatgttcacacctttagtacctttctggataacaattgcttatatcatttgtatttccacaaagcatttctattggttctttagtaattacctaaagagacgtgtagtctttaatggtgtttcctttagtacttttgaagaagctgcgctgtgcacctttttgttaaataaagaaatgtatctaaagttgcgtagtgatgtgctattacctcttacgcaatataatagatacttagctctttataataagtacaagtattttagtggagcaatggatacaactagctacagagaagctgcttgttgtcatctcgcaaaggctctcaatgacttcagtaactcaggttctgatgttctttaccaaccaccacaaacctctatcacctcagctgttttgcagagtggttttagaaaaatggcattcccatctggtaaagttgagggttgtatggtacaagtaacttgtggtacaactacacttaacggtctttggcttgatgacgtagtttactgtccaagacatgtgatctgcacctctgaagacatgcttaaccctaattatgaagatttactcattcgtaagtctaatcataatttcttggtacaggctggtaatgttcaactcagggttattggacattctatgcaaaattgtgtacttaagcttaaggttgatacagccaatcctaagacacctaagtataagtttgttcgcattcaaccaggacagactttttcagtgttagcttgttacaatggttcaccatctggtgtttaccaatgtgctatgaggcccaatttcactattaagggttcattccttaatggttcatgtggtagtgttggttttaacatagattatgactgtgtctctttttgttacatgcaccatatggaattaccaactggagttcatgctggcacagacttagaaggtaacttttatggaccttttgttgacaggcaaacagcacaagcagctggtacggacacaactattacagttaatgttttagcttggttgtacgctgctgttataaatggagacaggtggtttctcaatcgatttaccacaactcttaatgactttaaccttgtggctatgaagtacaattatgaacctctaacacaagaccatgttgacatactaggacctctttctgctcaaactggaattgccgttttagatatgtgtgcttcattaaaagaattactgcaaaatggtatgaatggacgtaccatattgggtagtgctttattagaagatgaatttacaccttttgatgttgttagacaatgctcaggtgttactttccaaagtgcagtgaaaagaacaatcaagggtacacaccactggttgttactcacaattttgacttcacttttagttttagtccagagtactcaatggtctttgttcttttttttgtatgaaaatgcctttttaccttttgctatgggtattattgctatgtctgcttttgcaatgatgtttgtcaaacataagcatgcatttctctgtttgtttttgttaccttctcttgccactgtagcttattttaatatggtctatatgcctgctagttgggtgatgcgtattatgacatggttggatatggttgatactagtttgtctggttttaagctaaaagactgtgttatgtatgcatcagctgtagtgttactaatccttatgacagcaagaactgtgtatgatgatggtgctaggagagtgtggacacttatgaatgtcttgacactcgtttataaagtttattatggtaatgctttagatcaagccatttccatgtgggctcttataatctctgttacttctaactactcaggtgtagttacaactgtcatgtttttggccagaggtattgtttttatgtgtgttgagtattgccctattttcttcataactggtaatacacttcagtgtataatgctagtttattgtttcttaggctatttttgtacttgttactttggcctcttttgtttactcaaccgctactttagactgactcttggtgtttatgattacttagtttctacacaggagtttagatatatgaattcacagggactactcccacccaagaatagcatagatgccttcaaactcaacattaaattgttgggtgttggtggcaaaccttgtatcaaagtagccactgtacagtctaaaatgtcagatgtaaagtgcacatcagtagtcttactctcagttttgcaacaactcagagtagaatcatcatctaaattgtgggctcaatgtgtccagttacacaatgacattctcttagctaaagatactactgaagcctttgaaaaaatggtttcactactttctgttttgctttccatgcagggtgctgtagacataaacaagctttgtgaagaaatgctggacaacagggcaaccttacaagctatagcctcagagtttagttcccttccatcatatgcagcttttgctactgctcaagaagcttatgagcaggctgttgctaatggtgattctgaagttgttcttaaaaagttgaagaagtctttgaatgtggctaaatctgaatttgaccgtgatgcagccatgcaacgtaagttggaaaagatggctgatcaagctatgacccaaatgtataaacaggctagatctgaggacaagagggcaaaagttactagtgctatgcagacaatgcttttcactatgcttagaaagttggataatgatgcactcaacaacattatcaacaatgcaagagatggttgtgttcccttgaacataatacctcttacaacagcagccaaactaatggttgtcataccagactataacacatataaaaatacgtgtgatggtacaacatttacttatgcatcagcattgtgggaaatccaacaggttgtagatgcagatagtaaaattgttcaacttagtgaaattagtatggacaattcacctaatttagcatggcctcttattgtaacagctttaagggccaattctgctgtcaaattacagaataatgagcttagtcctgttgcactacgacagatgtcttgtgctgccggtactacacaaactgcttgcactgatgacaatgcgttagcttactacaacacaacaaagggaggtaggtttgtacttgcactgttatccgatttacaggatttgaaatgggctagattccctaagagtgatggaactggtactatctatacagaactggaaccaccttgtaggtttgttacagacacacctaaaggtcctaaagtgaagtatttatactttattaaaggattaaacaacctaaatagaggtatggtacttggtagtttagctgccacagtacgtctacaagctggtaatgcaacagaagtgcctgccaattcaactgtattatctttctgtgcttttgctgtagatgctgctaaagcttacaaagattatctagctagtgggggacaaccaatcactaattgtgttaagatgttgtgtacacacactggtactggtcaggcaataacagttacaccggaagccaatatggatcaagaatcctttggtggtgcatcgtgttgtctgtactgccgttgccacatagatcatccaaatcctaaaggattttgtgacttaaaaggtaagtatgtacaaatacctacaacttgtgctaatgaccctgtgggttttacacttaaaaacacagtctgtaccgtctgcggtatgtggaaaggttatggctgtagttgtgatcaactccgcgaacccatgcttcagtcagctgatgcacaatcgtttttaaacgggtttgcggtgtaagtgcagcccgtcttacaccgtgcggcacaggcactagtactgatgtcgtatacagggcttttgacatctacaatgataaagtagctggttttgctaaattcctaaaaactaattgttgtcgcttccaagaaaaggacgaagatgacaatttaattgattcttactttgtagttaagagacacactttctctaactaccaacatgaagaaacaatttataatttacttaaggattgtccagctgttgctaaacatgacttctttaagtttagaatagacggtgacatggtaccacatatatcacgtcaacgtcttactaaatacacaatggcagacctcgtctatgctttaaggcattttgatgaaggtaattgtgacacattaaaagaaatacttgtcacatacaattgttgtgatgatgattatttcaataaaaaggactggtatgattttgtagaaaacccagatatattacgcgtatacgccaacttaggtgaacgtgtacgccaagctttgttaaaaacagtacaattctgtgatgccatgcgaaatgctggtattgttggtgtactgacattagataatcaagatctcaatggtaactggtatgatttcggtgatttcatacaaaccacgccaggtagtggagttcctgttgtagattcttattattcattgttaatgcctatattaaccttgaccagggctttaactgcagagtcacatgttgacactgacttaacaaagccttacattaagtgggatttgttaaaatatgacttcacggaagagaggttaaaactctttgaccgttattttaaatattgggatcagacataccacccaaattgtgttaactgtttggatgacagatgcattctgcattgtgcaaactttaatgttttattctctacagtgttcccacttacaagttttggaccactagtgagaaaaatatttgttgatggtgttccatttgtagtttcaactggataccacttcagagagctaggtgttgtacataatcaggatgtaaatttacatagctctagacttagttttaaggaattacttgtgtatgctgctgaccctgctatgcacgctgcttctggtaatctattactagataaacgcactacgtgcttttcagtagctgcacttactaacaatgttgcttttcaaactgtcaaacccggtaattttaacaaagacttctatgactttgctgtgtctaagggtttctttaaggaaggaagttctgttgaattaaaacacttcttctttgctcaggatggtaatgctgctatcagcgattatgactactatcgttataatctaccaacaatgtgtgatatcagacaactactatttgtagttgaagttgttgataagtactttgattgttacgatggtggctgtattaatgctaaccaagtcatcgtcaacaacctagacaaatcagctggttttccatttaataaatggggtaaggctagactttattatgattcaatgagttatgaggatcaagatgcacttttcgcatatacaaaacgtaatgtcatccctactataactcaaatgaatcttaagtatgccattagtgcaaagaatagagctcgcaccgtagctggtgtctctatctgtagtactatgaccaatagacagtttcatcaaaaattattgaaatcaatagccgccactagaggagctactgtagtaattggaacaagcaaattctatggtggttggcacaacatgttaaaaactgtttatagtgatgtagaaaaccctcaccttatgggttgggattatcctaaatgtgatagagccatgcctaatatgcttagaattatggcctcacttgttcttgctcgcaaacatacaacgtgttgtagcttgtcacaccgtttctatagattagctaatgagtgtgctcaagtattgagtgaaatggtcatgtgtggcggttcactatatgttaaaccaggtggaacctcatcaggagatgccacaactgcttatgctaatagtgtttttaacatttgtcaagctgtcacggccaatgttaatgcacttttatctactgatggtaacaaaattgccgataagtatgtccgcaatttacaacacagactttatgagtgtctctatagaaatagagatgttgacacagactttgtgaatgagttttacgcatatttgcgtaaacatttctcaatgatgatactctctgacgatgctgttgtgtgtttcaatagcacttatgcatctcaaggtctagtggctagcataaagaactttaagtcagttctttattatcaaaacaatgtttttatgtctgaagcaaaatgttggactgagactgaccttactaaaggacctcatgaattttgctctcaacatacaatgctagttaaacagggtgatgattatgtgtaccttccttacccagatccatcaagaatcctaggggccggctgttttgtagatgatatcgtaaaaacagatggtacacttatgattgaacggttcgtgtctttagctatagatgcttacccacttactaaacatcctaatcaggagtatgctgatgtctttcatttgtacttacaatacataagaaagctacatgatgagttaacaggacacatgttagacatgtattctgttatgcttactaatgataacacttcaaggtattgggaacctgagttttatgaggctatgtacacaccgcatacagtcttacaggctgttggggcttgtgttctttgcaattcacagacttcattaagatgtggtgcttgcatacgtagaccattcttatgttgtaaatgctgttacgaccatgtcatatcaacatcacataaattagtcttgtctgttaatccgtatgtttgcaatgctccaggttgtgatgtcacagatgtgactcaactttacttaggaggtatgagctattattgtaaatcacataaaccacccattagttttccattgtgtgctaatggacaagtttttggtttatataaaaatacatgtgttggtagcgataatgttactgactttaatgcaattgcaacatgtgactggacaaatgctggtgattacattttagctaacacctgtactgaaagactcaagctttttgcagcagaaacgctcaaagctactgaggagacatttaaactgtcttatggtattgctactgtacgtgaagtgctgtctgacagagaattacatctttcatgggaagttggtaaacctagaccaccacttaaccgaaattatgtctttactggttatcgtgtaactaaaaacagtaaagtacaaataggagagtacacctttgaaaaaggtgactatggtgatgctgttgtttaccgaggtacaacaacttacaaattaaatgttggtgattattttgtgctgacatcacatacagtaatgccattaagtgcacctacactagtgccacaagagcactatgttagaattactggcttatacccaacactcaatatctcagatgagttttctagcaatgttgcaaattatcaaaaggttggtatgcaaaagtattctacactccagggaccacctggtactggtaagagtcattttgctattggcctagctctctactacccttctgctcgcatagtgtatacagcttgctctcatgccgctgttgatgcactatgtgagaaggcattaaaatatttgcctatagataaatgtagtagaattatacctgcacgtgctcgtgtagagtgttttgataaattcaaagtgaattcaacattagaacagtatgtcttttgtactgtaaatgcattgcctgagacgacagcagatatagttgtctttgatgaaatttcaatggccacaaattatgatttgagtgttgtcaatgccagattacgtgctaagcactatgtgtacattggcgaccctgctcaattacctgcaccacgcacattgctaactaagggcacactagaaccagaatatttcaattcagtgtgtagacttatgaaaactataggtccagacatgttcctcggaacttgtcggcgttgtcctgctgaaattgttgacactgtgagtgctttggtttatgataataagcttaaagcacataaagacaaatcagctcaatgctttaaaatgttttataagggtgttatcacgcatgatgtttcatctgcaattaacaggccacaaataggcgtggtaagagaattccttacacgtaaccctgcttggagaaaagctgtctttatttcaccttataattcacagaatgctgtagcctcaaagattttgggactaccaactcaaactgttgattcatcacagggctcagaatatgactatgtcatattcactcaaaccactgaaacagctcactcttgtaatgtaaacagatttaatgttgctattaccagagcaaaagtaggcatactttgcataatgtctgatagagacctttatgacaagttgcaatttacaagtcttgaaattccacgtaggaatgtggcaactttacaagctgaaaatgtaacaggactctttaaagattgtagtaaggtaatcactgggttacatcctacacaggcacctacacacctcagtgttgacactaaattcaaaactgaaggtttatgtgttgacatacctggcatacctaaggacatgacctatagaagactcatctctatgatgggttttaaaatgaattatcaagttaatggttaccctaacatgtttatcacccgcgaagaagctataagacatgtacgtgcatggattggcttcgatgtcgaggggtgtcatgctactagagaagctgttggtaccaatttacctttacagctaggtttttctacaggtgttaacctagttgctgtacctacaggttatgttgatacacctaataatacagatttttccagagttagtgctaaaccaccgcctggagatcaatttaaacacctcataccacttatgtacaaaggacttccttggaatgtagtgcgtataaagattgtacaaatgttaagtgacacacttaaaaatctctctgacagagtcgtatttgtcttatgggcacatggctttgagttgacatctatgaagtattttgtgaaaataggacctgagcgcacctgttgtctatgtgatagacgtgccacatgcttttccactgcttcagacacttatgcctgttggcatcattctattggatttgattacgtctataatccgtttatgattgatgttcaacaatggggttttacaggtaacctacaaagcaaccatgatctgtattgtcaagtccatggtaatgcacatgtagctagttgtgatgcaatcatgactaggtgtctagctgtccacgagtgctttgttaagcgtgttgactggactattgaatatcctataattggtgatgaactgaagattaatgcggcttgtagaaaggttcaacacatggttgttaaagctgcattattagcagacaaattcccagttcttcacgacattggtaaccctaaagctattaagtgtgtacctcaagctgatgtagaatggaagttctatgatgcacagccttgtagtgacaaagcttataaaatagaagaattattctattcttatgccacacattctgacaaattcacagatggtgtatgcctattttggaattgcaatgtcgatagatatcctgctaattccattgtttgtagatttgacactagagtgctatctaaccttaacttgcctggttgtgatggtggcagtttgtatgtaaataaacatgcattccacacaccagcttttgataaaagtgcttttgttaatttaaaacaattaccatttttctattactctgacagtccatgtgagtctcatggaaaacaagtagtgtcagatatagattatgtaccactaaagtctgctacgtgtataacacgttgcaatttaggtggtgctgtctgtagacatcatgctaatgagtacagattgtatctcgatgcttataacatgatgatctcagctggctttagcttgtgggtttacaaacaatttgatacttataacctctggaacacttttacaagacttcagagtttagaaaatgtggcttttaatgttgtaaataagggacactttgatggacaacagggtgaagtaccagtttctatcattaataacactgtttacacaaaagttgatggtgttgatgtagaattgtttgaaaataaaacaacattacctgttaatgtagcatttgagctttgggctaagcgcaacattaaaccagtaccagaggtgaaaatactcaataatttgggtgtggacattgctgctaatactgtgatctgggactacaaaagagatgctccagcacatatatctactattggtgtttgttctatgactgacatagccaagaaaccaactgaaacgatttgtgcaccactcactgtcttttttgatggtagagttgatggtcaagtagacttatttagaaatgcccgtaatggtgttcttattacagaaggtagtgttaaaggtttacaaccatctgtaggtcccaaacaagctagtcttaatggagtcacattaattggagaagccgtaaaaacacagttcaattattataagaaagttgatggtgttgtccaacaattacctgaaacttactttactcagagtagaaatttacaagaatttaaacccaggagtcaaatggaaattgatttcttagaattagctatggatgaattcattgaacggtataaattagaaggctatgccttcgaacatatcgtttatggagattttagtcatagtcagttaggtggtttacatctactgattggactagctaaacgttttaaggaatcaccttttgaattagaagattttattcctatggacagtacagttaaaaactatttcataacagatgcgcaaacaggttcatctaagtgtgtgtgttctgttattgatttattacttgatgattttgttgaaataataaaatcccaagatttatctgtagtttctaaggttgtcaaagtgactattgactatacagaaatttcatttatgctttggtgtaaagatggccatgtagaaacattttacccaaaattacaatctagtcaagcgtggcaaccgggtgttgctatgcctaatctttacaaaatgcaaagaatgctattagaaaagtgtgaccttcaaaattatggtgatagtgcaacattacctaaaggcataatgatgaatgtcgcaaaatatactcaactgtgtcaatatttaaacacattaacattagctgtaccctataatatgagagttatacattttggtgctggttctgataaaggagttgcaccaggtacagctgttttaagacagtggttgcctacgggtacgctgcttgtcgactcagatcttaatgactttgtctctgatgcagattcaactttgattggtgattgtgcaactgtacatacagctaataaatgggatctcattattagtgatatgtacgaccctaagactaaaaatgttacaaaagaaaatgactctaaagagggttttttcacttacatttgtgggtttatacaacaaaagctagctcttggaggttccgtggctataaagataacagaacattcttggaatgctgatctttataagctcatgggacacttcgcatggtggacagcctttgttactaatgtgaatgcgtcatcatctgaagcatttttaattggatgtaattatcttggcaaaccacgcgaacaaatagatggttatgtcatgcatgcaaattacatattttggaggaatacaaatccaattcagttgtcttcctattctttatttgacatgagtaaatttccccttaaattaaggggtactgctgttatgtctttaaaagaaggtcaaatcaatgatatgattttatctcttcttagtaaaggtagacttataattagagaaaacaacagagttgttatttctagtgatgttcttgttaacaactaaacgaacaatgtttgtttttcttgttttattgccactagtctctagtcagtgtgttaatcttacaaccagaactcaattaccccctgcatacactaattctttcacacgtggtgtttattaccctgacaaagttttcagatcctcagttttacattcaactcaggacttgttcttacctttcttttccaatgttacttggttccatgctatacatgtctctgggaccaatggtactaagaggtttgataaccctgtcctaccatttaatgatggtgtttattttgcttccactgagaagtctaacataataagaggctggatttttggtactactttagattcgaagacccagtccctacttattgttaataacgctactaatgttgttattaaagtctgtgaatttcaattttgtaatgatccatttttgggtgtttattaccacaaaaacaacaaaagttggatggaaagtgagttcagagtttattctagtgcgaataattgcacttttgaatatgtctctcagccttttcttatggaccttgaaggaaaacagggtaatttcaaaaatcttagggaatttgtgtttaagaatattgatggttattttaaaatatattctaagcacacgcctattaatttagtgcgtgatctccctcagggtttttcggctttagaaccattggtagatttgccaataggtattaacatcactaggtttcaaactttacttgctttacatagaagttatttgactcctggtgattcttcttcaggttggacagctggtgctgcagcttattatgtgggttatcttcaacctaggacttttctattaaaatataatgaaaatggaaccattacagatgctgtagactgtgcacttgaccctctctcagaaacaaagtgtacgttgaaatccttcactgtagaaaaaggaatctatcaaacttctaactttagagtccaaccaacagaatctattgttagatttcctaatattacaaacttgtgcccttttggtgaagtttttaacgccaccagatttgcatctgtttatgcttggaacaggaagagaatcagcaactgtgttgctgattattctgtcctatataattccgcatcattttccacttttaagtgttatggagtgtctcctactaaattaaatgatctctgctttactaatgtctatgcagattcatttgtaattagaggtgatgaagtcagacaaatcgctccagggcaaactggaaagattgctgattataattataaattaccagatgattttacaggctgcgttatagcttggaattctaacaatcttgattctaaggttggtggtaattataattacctgtatagattgtttaggaagtctaatctcaaaccttttgagagagatatttcaactgaaatctatcaggccggtagcacaccttgtaatggtgttgaaggttttaattgttactttcctttacaatcatatggtttccaacccactaatggtgttggttaccaaccatacagagtagtagtactttcttttgaacttctacatgcaccagcaactgtttgtggacctaaaaagtctactaatttggttaaaaacaaatgtgtcaatttcaacttcaatggtttaacaggcacaggtgttcttactgagtctaacaaaaagtttctgcctttccaacaatttggcagagacattgctgacactactgatgctgtccgtgatccacagacacttgagattcttgacattacaccatgttcttttggtggtgtcagtgttataacaccaggaacaaatacttctaaccaggttgctgttctttatcagggtgttaactgcacagaagtccctgttgctattcatgcagatcaacttactcctacttggcgtgtttattctacaggttctaatgtttttcaaacacgtgcaggctgtttaataggggctgaacatgtcaacaactcatatgagtgtgacatacccattggtgcaggtatatgcgctagttatcagactcagactaattctcctcggcgggcacgtagtgtagctagtcaatccatcattgcctacactatgtcacttggtgcagaaaattcagttgcttactctaataactctattgccatacccacaaattttactattagtgttaccacagaaattctaccagtgtctatgaccaagacatcagtagattgtacaatgtacatttgtggtgattcaactgaatgcagcaatcttttgttgcaatatggcagtttttgtacacaattaaaccgtgctttaactggaatagctgttgaacaagacaaaaacacccaagaagtttttgcacaagtcaaacaaatttacaaaacaccaccaattaaagattttggtggttttaatttttcacaaatattaccagatccatcaaaaccaagcaagaggtcatttattgaagatctacttttcaacaaagtgacacttgcagatgctggcttcatcaaacaatatggtgattgccttggtgatattgctgctagagacctcatttgtgcacaaaagtttaacggccttactgttttgccacctttgctcacagatgaaatgattgctcaatacacttctgcactgttagcgggtacaatcacttctggttggacctttggtgcaggtgctgcattacaaataccatttgctatgcaaatggcttataggtttaatggtattggagttacacagaatgttctctatgagaaccaaaaattgattgccaaccaatttaatagtgctattggcaaaattcaagactcactttcttccacagcaagtgcacttggaaaacttcaagatgtggtcaaccaaaatgcacaagctttaaacacgcttgttaaacaacttagctccaattttggtgcaatttcaagtgttttaaatgatatcctttcacgtcttgacaaagttgaggctgaagtgcaaattgataggttgatcacaggcagacttcaaagtttgcagacatatgtgactcaacaattaattagagctgcagaaatcagagcttctgctaatcttgctgctactaaaatgtcagagtgtgtacttggacaatcaaaaagagttgatttttgtggaaagggctatcatcttatgtccttccctcagtcagcacctcatggtgtagtcttcttgcatgtgacttatgtccctgcacaagaaaagaacttcacaactgctcctgccatttgtcatgatggaaaagcacactttcctcgtgaaggtgtctttgtttcaaatggcacacactggtttgtaacacaaaggaatttttatgaaccacaaatcattactacagacaacacatttgtgtctggtaactgtgatgttgtaataggaattgtcaacaacacagtttatgatcctttgcaacctgaattagactcattcaaggaggagttagataaatattttaagaatcatacatcaccagatgttgatttaggtgacatctctggcattaatgcttcagttgtaaacattcaaaaagaaattgaccgcctcaatgaggttgccaagaatttaaatgaatctctcatcgatctccaagaacttggaaagtatgagcagtatataaaatggccatggtacatttggctaggttttatagctggcttgattgccatagtaatggtgacaattatgctttgctgtatgaccagttgctgtagttgtctcaagggctgttgttcttgtggatcctgctgcaaatttgatgannncnactctgagccagtgctcaaaggagtcaaattacattacacataaacgaacttatggatttgtttatgagaatcttcacaattggaactgtaactttgaagcaaggtgaaatcaaggatgctactccttcagattttgttcgcgctactgcaacgataccgatacaagcctcactccctttcggatggcttattgttggcgttgcacttcttgctgtttttcagagcgcttccaaaatcataaccctcaaaaagagatggcaactagcactctccaagggtgttcactttgtttgcaacttgctgttgttgtttgtaacagtttactcacaccttttgctcgttgctgctggccttgaagccccttttctctatctttatgctttagtctacttcttgcagagtataaactttgtaagaataataatgaggctttggctttgctggaaatgccgttccaaaaacccattactttatgatgccaactattttctttgctggcatactaattgttacgactattgtataccttacaatagtgtaacttcttcaattgtcattacttcaggtgatggcacaacaagtcctatttctgaacatgactaccagattggtggttatactgaaaaatgggaatctggagtaaaagactgtgttgtattacacagttacttcacttcagactattaccagctgtactcaactcaattgagtacagacactggtgttgaacatgttaccttcttcatctacaataaaattgttgatgagcctgaagaacatgtccaaattcacacaatcgacggttcatccggagttgttaatccagtaatggaaccaatttatgatgaaccgacgacgactactagcgtgcctttgtaagcacaagctgatgagtacgaacttatgtactcattcgtttcggaagagacaggtacgttaatagttaatagcgtacttctttttcttgctttcgtggtattcttgctagttacactagccatccttactgcgcttcgattgtgtgcgtactgctgcaatattgttaacgtgagtcttgtaaaaccttctttttacgtttactctcgtgttaaaaatctgaattcttctagagttcctgatcttccggtctaaacgaactaaatattatattagtttttctgtttggaactttaattttagccatggcagattccaacggtactattaccgttgaagagcttaaaaagctccttgaacaatggaacctagtaataggtttcctattccttacatggatttgtcttctacaatttgcctatgccaacaggaataggtttttgtatataattaagttaattttcctctggctgttatggccagtaactttagcttgttttgtgcttgctgctgtttacagaataaattggatcaccggtggaattgctatcgcaatggcttgtcttgtaggcttgatgtggctcagctacttcattgcttctttcagactgtttgcgcgtacgcgttccatgtggtcattcaatccagaaactaacattcttctcaacgtgccactccatggcactattctgaccagaccgcttctagaaagtgaactcgtaatcggagctgtgatccttcgtggacatcttcgtattgctggacaccatctaggacgctgtgacatcaaggacctgcctaaagaaatcactgttgctacatcacgaacgctttcttattacaaattgggagcttcgcagcgtgtagcaggtgactcaggttttgctgcatacagtcgctacaggattggcaactataaattaaacacagaccattccagtagcagtgacaatattgctttgcttgtacagtaagtgacaacagatgtttcatctcgttgactttcaggttactatagcagagatattactaattattatgaggacttttaaagtttccatttggaatcttgattacatcataaacctcataattaaaaatttatctaagtcactaactgagaataaatattctcaattagatgaagagcaaccaatggagattgattaaacgaacatgaaaattattcttttcttggcactgataacactcgctacttgtgagctttatcactaccaagagtgtgttagaggtacaacagtacttttaaaagaaccttgctcttctggaacatacgagggcaattcaccatttcatcctctagctgataacaaatttgcactgacttgctttagcactcaatttgcttttgcttgtcctgacggcgtaaaacacgtctatcagttacgtgccagatcagtttcacctaaactgttcatcagacaagaggaagttcaagaactttactctccaatttttcttattgttgcggcaatagtgtttataacactttgcttcacactcaaaagaaagacagaatgattgaactttcattaattgacttctatttgtgctttttagcctttctgctattccttgttttaattatgcttattatcttttggttctcacttgaactgcaagatcataatgaaacttgtcacgcctaaacgaacatgaaatttcttgttttcttaggaatcatcacaactgtagctgcatttcaccaagaatgtagtttacagtcatgtactcaacatcaaccatatgtagttgatgacccgtgtcctattcacttctattctaaatggtatattagagtaggagctagaaaatcagcacctttaattgaattgtgcgtggatgaggctggttctaaatcacccattcagtacatcgatatcggtaattatacagtttcctgtttaccttttacaattaattgccaggaacctaaattgggtagtcttgtagtgcgttgttcgttctatgaagactttttagagtatcatgacgttcgtgttgttttagatttcatctaaacgaacaaactaaaatgtctgataatggaccccaaaatcagcgaaatgcaccccgcattacgtttggtggaccctcagattcaactggcagtaaccagaatggagaacgcagtggggcgcgatcaaaacaacgtcggccccaaggtttacccaataatactgcgtcttggttcaccgctctcactcaacatggcaaggaagaccttaaattccctcgaggacaaggcgttccaattaacaccaatagcagtccagatgaccaaattggctactaccgaagagctaccagacgaattcgtggtggtgacggtaaaatgaaagatctcagtccaagatggtatttctactacctaggaactgggccagaagctggacttccctatggtgctaacaaagacggcatcatatgggttgcaactgagggagccttgaatacaccaaaagatcacattggcacccgcaatcctgctaacaatgctgcaatcgtgctacaacttcctcaaggaacaacattgccaaaaggcttctacgcagaagggagcagaggcggcagtcaagcctcttctcgttcctcatcacgtagtcgcaacagttcaagaaattcaactccaggcagcagtaggggaacttctcctgctagaatggctggcaatggcggtgatgctgctcttgctttgctgctgcttgacagattgaaccagcttgagagcaaaatgtctggtaaaggccaacaacaacaaggccaaactgtcactaagaaatctgctgctgaggcttctaagaagcctcggcaaaaacgtactgccactaaagcatacaatgtaacacaagctttcggcagacgtggtccagaacaaacccaaggaaattttggggaccaggaactaatcagacaaggaactgattacaaacattggccgcaaattgcacaatttgcccccagcgcttcagcgttcttcggaatgtcgcgcattggcatggaagtcacaccttcgggaacgtggttgacctacacaggtgccatcaaattggatgacaaagatccaaatttcaaagatcaagtcattttgctgaataagcatattgacgcatacaaaacattcccaccaacagagcctaaaaaggacaaaaagaagaaggctgatgaaactcaagccttaccgcagagacagaagaaacagcaaactgtgactcttcttcctgctgcagatttggatgatttctccaaacaattgcaacaatccatgagcagtgctgactcaactcaggcctaaactcatgcagaccacacaaggcagatgggctatataaacgttttcgcttttccgtttacgatatatagtctactcttgtgcagaatgaattctcgtaactacatagcacaagtagatgtagttaactttaatctcacatagcaatctttaatcagtgtgtaacattagggaggacttgaaagagccaccacattttcaccgaggccacgcggagtacgatcgagtgtacagtgaacaatgctagggagagctgcctatatggaagagccctaatgtgtaaaattaattttagtagtgctatccccatgtg

SEQ ID NO: 51 - DNA, 29810 bp, synthetic construct
  misc_feature 1..29810: note = Reconstituted virus 14
  source 1..29810: mol_type = other DNA
accaactttcgatctcttgtagatctgttctctaaacgaactttaaaatctgtgtggctgtcactcggctgcatgcttagtgcactcacgcagtataattaataactaattactgtcgttgacaggacacgagtaactcgtctatcttctgcaggctgcttacggtttcgtccgtgttgcagccgatcatcagcacatctaggttttgtccgggtgtgaccgaaaggtaagatggagagccttgtccctggtttcaacgagaaaacacacgtccaactcagtttgcctgttttacaggttcgcgacgtgctcgtacgtggctttggagactccgtggaggaggtcttatcagaggcacgtcaacatcttaaagatggcacttgtggcttagtagaagttgaaaaaggcgttttgcctcaacttgaacagccctatgtgttcatcaaacgttcggatgctcgaactgcacctcatggtcatgttatggttgagctggtagcagaactcgaaggcattcagtacggtcgtagtggtgagacacttggtgtccttgtccctcatgtgggcgaaataccagtggcttaccgcaaggttcttcttcgtaagaacggtaataaaggagctggtggccatagttacggcgccgatctaaagtcatttgacttaggcgacgagcttggcactgatccttatgaagattttcaagaaaactggaacactaaacatagcagtggtgttacccgtgaactcatgcgtgagcttaacggaggggcatacactcgctatgtcgataacaacttctgtggccctgatggctaccctcttgagtgcattaaagaccttctagcacgtgctggtaaagcttcatgcactttgtccgaacaactggactttattgacactaagaggggtgtatactgctgccgtgaacatgagcatgaaattgcttggtacacggaacgttctgaaaagagctatgaattgcagacaccttttgaaattaaattggcaaagaaatttgacaccttcaatggggaatgtccaaattttgtatttcccttaaattccataatcaagactattcaaccaagggttgaaaagaaaaagcttgatggctttatgggtagaattcgatctgtctatccagttgcgtcaccaaatgaatgcaaccaaatgtgcctttcaactctcatgaagtgtgatcattgtggtgaaacttcatggcagacgggcgattttgttaaagccacttgcgaattttgtggcactgagaatttgactaaagaaggtgccactacttgtggttacttaccccaaaatgctgttgttaaaatttattgtccagcatgtcacaattcagaagtaggacctgagcatagtcttgccgaataccataatgaatctggcttgaaaaccattcttcgtaagggtggtcgcactattgcctttggaggctgtgtgttctcttatgttggttgccataacaagtgtgcctattgggttccacgtgctagcgctaacataggttgtaaccatacaggtgttgttggagaaggttccgaaggtcttaatgacaaccttcttgaaatactccaaaaagagaaagtcaacatcaatattgttggtgactttaaacttaatgaagagatcgccattattttggcatctttttctgcttccacaagtgcttttgtggaaactgtgaaaggtttggattataaagcattcaaacaaattgttgaatcctgtggtaattttaaagttacaaaaggaaaagctaaaaaaggtgcctggaatattggtgaacagaaatcaatactgagtcctctttatgcatttgcatcagaggctgctcgtgttgtacgatcaattttctcccgcactcttgaaactgctcaaaattctgtgcgtgttttacagaaggccgctataacaatactagatggaatttcacagtattcactgagactcattgatgctatgatgttcacatctgatttggctactaacaatctagttgtaatggcctacattacaggtggtgttgttcagttgacttcgcagtggctaactaacatctttggcactgtttatgaaaaactcaaacccgtccttgattggcttgaagagaagtttaaggaaggtgtagagtttcttagagacggttgggaaattgttaaatttatctcaacctgtgcttgtgaaattgtcggtggacaaattgtcacctgtgcaaaggaaattaaggagagtgttcagacattctttaagcttgtaaataaatttttggctttgtgtgctgactctatcattattggtggagctaaacttaaagccttgaatttaggtgaaacatttgtcacgcactcaaagggattgtacagaaagtgtgttaaatccagagaagaaactggcctactcatgcctctaaaagccccaaaagaaattatcttcttagagggagaaacacttcccacagaagtgttaacagaggaagttgtcttgaaaactggtgatttacaaccattagaacaacctactagtgaagctgttgaagctccattggttggtacaccagtttgtattaacgggcttatgttgctcgaaatcaaagacacagaaaagtactgtgcccttgcacctaatatgatggtaacaaacaataccttcacactcaaaggcggtgcaccaacaaaggttacttttggtgatgacactgtgatagaagtgcaaggttacaagagtgtgaatatcacttttgaacttgatgaaaggattgataaagtacttaatgagaagtgctctgcctatacagttgaactcggtacagaagtaaatgagttcgcctgtgttgtggcagatgctgtcataaaaactttgcaaccagtatctgaattacttacaccactgggcattgatttagatgagtggagtatggctacatactacttatttgatgagtctggtgagtttaaattggcttcacatatgtattgttctttttaccctccagatgaggatgaagaagaaggtgattgtgaagaagaagagtttgagccatcaactcaatatgagtatggtactgaagatgattaccaaggtaaacctttggaatttggtgccacttctgctgctcttcaacctgaagaagagcaagaagaagattggttagatgatgatagtcaacaaactgttggtcaacaagacggcagtgaggacaatcagacaactactattcaaacaattgttgaggttcaacctcaattagagatggaacttacaccagttgttcagactattgaagtgaatagttttagtggttatttaaaacttactgacaatgtatacattaaaaatgcagacattgtggaagaagctaaaaaggtaaaaccaacagtggttgttaatgcagccaatgtttaccttaaacatggaggaggtgttgcaggagccttaaataaggctactaacaatgccatgcaagttgaatctgatgattacatagctactaatggaccacttaaagtgggtggtagttgtgttttaagcggacacaatcttgctaaacactgtcttcatgttgtcggcccaaatgttaacaaaggtgaagacattcaacttcttaagagtgcttatgaaaattttaatcagcacgaagttctacttgcaccattattatcagctggtatttttggtgctgaccctatacattctttaagagtttgtgtagatactgttcgcacaaatgtctacttagctgtctttgataaaaatctctatgacaaacttgtttcaagctttttggaaatgaagagtgaaaagcaagttgaacaaaagatcgctgagattcctaaagaggaagttaagccatttataactgaaagtaaaccttcagttgaacagagaaaacaagatgataagaaaatcaaagcttgtgttgaagaagttacaacaactctggaagaaactaagttcctcacagaaaacttgttactttatattgacattaatggcaatcttcatccagattctgccactcttgttagtgacattgacatcactttcttaaagaaagatgctccatatatagtgggtgatgttgttcaagagggtgttttaactgctgtggttatacctactaaaaaggctggtggcactactgaaatgctagcgaaagctttgagaaaagtgccaacagacaattatataaccacttacccgggtcagggtttaaatggttacactgtagaggaggcaaagacagtgcttaaaaagtgtaaaagtgccttttacattctaccatctattatctctaatgagaagcaagaaattcttggaactgtttcttggaatttgcgagaaatgcttgcacatgcagaagaaacacgcaaattaatgcctgtctgtgtggaaactaaagccatagtttcaactatacagcgtaaatataagggtattaaaatacaagagggtgtggttgattatggtgctagattttacttttacaccagtaaaacaactgtagcgtcacttatcaacacacttaacgatctaaatgaaactcttgttacaatgccacttggctatgtaacacatggcttaaatttggaagaagctgctcggtatatgagatctctcaaagtgccagctacagtttctgtttcttcacctgatgctgttacagcgtataatggttatcttacttcttcttctaaaacacctgaagaacattttattgaaaccatctcacttgctggttcctataaagattggtcctattctggacaatctacacaactaggtatagaatttcttaagagaggtgataaaagtgtatattacactagtaatcctaccacattccacctagatggtgaagttatcacctttgacaatcttaagacacttctttctttgagagaagtgaggactattaaggtgtttacaacagtagacaacattaacctccacacgcaagttgtggacatgtcaatgacatatggacaacagtttggtccaacttatttggatggagctgatgttactaaaataaaacctcataattcacatgaaggtaaaacattttatgttttacctaatgatgacactctacgtgttgaggcttttgagtactaccacacaactgatcctagttttctgggtaggtacatgtcagcattaaatcacactaaaaagtggaaatacccacaagttaatggtttaacttctattaaatgggcagataacaactgttatcttgccactgcattgttaacactccaacaaatagagttgaagtttaatccacctgctctacaagatgcttattacagagcaagggctggtgaagctgctaacttttgtgcacttatcttagcctactgtaataagacagtaggtgagttaggtgatgttagagaaacaatgagttacttgtttcaacatgccaatttagattcttgcaaaagagtcttgaacgtggtgtgtaaaacttgtggacaacagcagacaacccttaagggtgtagaagctgttatgtacatgggcacactttcttatgaacaatttaagaaaggtgttcagataccttgtacgtgtggtaaacaagctacaaaatatctagtacaacaggagtcaccttttgttatgatgtcagcaccacctgctcagtatgaacttaagcatggtacatttacttgtgctagtgagtacactggtaattaccagtgtggtcactataaacatataacttctaaagaaactttgtattgcatagacggtgctttacttacaaagtcctcagaatacaaaggtcctattacggatgttttctacaaagaaaacagttacacaacaaccataaaaccagttacttataaattggatggtgttgtttgtacagaaattgaccctaagttggacaattattataagaaagacaattcttatttcacagagcaaccaattgatcttgtaccaaaccaaccatatccaaacgcaagcttcgataattttaagtttgtatgtgataatatcaaatttgctgatgatttaaaccagttaactggttataagaaacctgcttcaagagagcttaaagttacatttttccctgacttaaatggtgatgtggtggctattgattataaacactacacaccctcttttaagaaaggagctaaattgttacataaacctattgtttggcatgttaacaatgcaactaataaagccacgtataaaccaaatacctggtgtatacgttgtctttggagcacaaaaccagttgaaacatcaaattcgtttgatgtactgaagtcagaggacgcgcagggaatggataatcttgcctgcgaagatctaaaaccagtctctgaagaagtagtggaaaatcctaccatacagaaagacgttcttgagtgtaatgtgaaaactaccgaagttgtaggagacattatacttaaaccagcaaataatagtttaaaaattacagaagaggttggccacacagatctaatggctgcttatgtagacaattctagtcttactattaagaaacctaatgaattatctagagtattaggtttgaaaacccttgctactcatggtttagctgctgttaatagtgtcccttgggatactatagctaattatgctaagccttttcttaacaaagttgttagtacaactactaacatagttacacggtgtttaaaccgtgtttgtactaattatatgccttatttctttactttattgctacaattgtgtacttttactagaagtacaaattctagaattaaagcatctatgccgactactatagcaaagaatactgttaagagtgtcggtaaattttgtctagaggcttcatttaattatttgaagtcacctaatttttctaaactgataaatattataatttggtttttactattaagtgtttgcctaggttctttaatctactcaaccgctgctttaggtgttttaatgtctaatttaggcatgccttcttactgtactggttacagagaaggctatttgaactctactaatgtcactattgcaacctactgtactggttctataccttgtagtgtttgtcttagtggtttagattctttagacacctatccttctttagaaactatacaaattaccatttcatcttttaaatgggatttaactgcttttggcttagttgcagagtggtttttggcatatattcttttcactaggtttttctatgtacttggattggctgcaatcatgcaattgtttttcagctattttgcagtacattttattagtaattcttggcttatgtggttaataattaatcttgtacaaatggccccgatttcagctatggttagaatgtacatcttctttgcatcattttattatgtatggaaaagttatgtgcatgttgtagacggttgtaattcatcaacttgtatgatgtgttacaaacgtaatagagcaacaagagtcgaatgtacaactattgttaatggtgttagaaggtccttttatgtctatgctaatggaggtaaaggcttttgcaaactacacaattggaattgtgttaattgtgatacattctgtgctggtagtacatttattagtgatgaagttgcgagagacttgtcactacagtttaaaagaccaataaatcctactgaccagtcttcttacatcgttgatagtgttacagtgaagaatggttccatccatctttactttgataaagctggtcaaaagacttatgaaagacattctctctctcattttgttaacttagacaacctgagagctaataacactaaaggttcattgcctattaatgttatagtttttgatggtaaatcaaaatgtgaagaatcatctgcaaaatcagcgtctgtttactacagtcagcttatgtgtcaacctatactgttactagatcaggcattagtgtctgatgttggtgatagtgcggaagttgcagttaaaatgtttgatgcttacgttaatacgttttcatcaacttttaacgtaccaatggaaaaactcaaaacactagttgcaactgcagaagctgaacttgcaaagaatgtgtccttagacaatgtcttatctacttttatttcagcagctcggcaagggtttgttgattcagatgtagaaactaaagatgttgttgaatgtcttaaattgtcacatcaatctgacatagaagttactggcgatagttgtaataactatatgctcacctataacaaagttgaaaacatgacaccccgtgaccttggtgcttgtattgactgtagtgcgcgtcatattaatgcgcaggtagcaaaaagtcacaacattgctttgatatggaacgttaaagatttcatgtcattgtctgaacaactacgaaaacaaatacgtagtgctgctaaaaagaataacttaccttttaagttgacatgtgcaactactagacaagttgttaatgttgtaacaacaaagatagcacttaagggtggtaaaattgttaataattggttgaagcagttaattaaagttacacttgtgttcctttttgttgctgctattttctatttaataacacctgttcatgtcatgtctaaacatactgacttttcaagtgaaatcataggatacaaggctattgatggtggtgtcactcgtgacatagcatctacagatacttgttttgctaacaaacatgctgattttgacacatggtttagccagcgtggtggtagttatactaatgacaaagcttgcccattgattgctgcagtcataacaagagaagtgggttttgtcgtgcctggtttgcctggcacgatattacgcacaactaatggtgactttttgcatttcttacctagagtttttagtgcagttggtaacatctgttacacaccatcaaaacttatagagtacactgactttgcaacatcagcttgtgttttggctgctgaatgtacaatttttaaagatgcttctggtaagccagtaccatattgttatgataccaatgtactagaaggttctgttgcttatgaaagtttacgccctgacacacgttatgtgctcatggatggctctattattcaatttcctaacacctaccttgaaggttctgttagagtggtaacaacttttgattctgagtactgtaggcacggcacttgtgaaagatcagaagctggtgtttgtgtatctactagtggtagatgggtacttaacaatgattattacagatctttaccaggagttttctgtggtgtagatgctgtaaatttacttactaatatgtttacaccactaattcaacctattggtgctttggacatatcagcatctatagtagctggtggtattgtagctatcgtagtaacatgccttgcctactattttatgaggtttagaagagcttttggtgaatacagtcatgtagttgcctttaatactttactattccttatgtcattcactgtactctgtttaacaccagtttactcattcttacctggtgtttattctgttatttacttgtacttgacattttatcttactaatgatgtttcttttttagcacatattcagtggatggttatgttcacacctttagtacctttctggataacaattgcttatatcatttgtatttccacaaagcatttctattggttctttagtaattacctaaagagacgtgtagtctttaatggtgtttcctttagtacttttgaagaagctgcgctgtgcacctttttgttaaataaagaaatgtatctaaagttgcgtagtgatgtgctattacctcttacgcaatataatagatacttagctctttataataagtacaagtattttagtggagcaatggatacaactagctacagagaagctgcttgttgtcatctcgcaaaggctctcaatgacttcagtaactcaggttctgatgttctttaccaaccaccacaaacctctatcacctcagctgttttgcagagtggttttagaaaaatggcattcccatctggtaaagttgagggttgtatggtacaagtaacttgtggtacaactacacttaacggtctttggcttgatgacgtagtttactgtccaagacatgtgatctgcacctctgaagacatgcttaaccctaattatgaagatttactcattcgtaagtctaatcataatttcttggtacaggctggtaatgttcaactcagggttattggacattctatgcaaaattgtgtacttaagcttaaggttgatacagccaatcctaagacacctaagtataagtttgttcgcattcaaccaggacagactttttcagtgttagcttgttacaatggttcaccatctggtgtttaccaatgtgctatgaggcccaatttcactattaagggttcattccttaatggttcatgtggtagtgttggttttaacatagattatgactgtgtctctttttgttacatgcaccatatggaattaccaactggagttcatgctggcacagacttagaaggtaacttttatggaccttttgttgacaggcaaacagcacaagcagctggtacggacacaactattacagttaatgttttagcttggttgtacgctgctgttataaatggagacaggtggtttctcaatcgatttaccacaactcttaatgactttaaccttgtggctatgaagtacaattatgaacctctaacacaagaccatgttgacatactaggacctctttctgctcaaactggaattgccgttttagatatgtgtgcttcattaaaagaattactgcaaaatggtatgaatggacgtaccatattgggtagtgctttattagaagatgaatttacaccttttgatgttgttagacaatgctcaggtgttactttccaaagtgcagtgaaaagaacaatcaagggtacacaccactggttgttactcacaattttgacttcacttttagttttagtccagagtactcaatggtctttgttcttttttttgtatgaaaatgcctttttaccttttgctatgggtattattgctatgtctgcttttgcaatgatgtttgtcaaacataagcatgcatttctctgtttgtttttgttaccttctcttgccactgtagcttattttaatatggtctatatgcctgctagttgggtgatgcgtattatgacatggttggatatggttgatactagtttgtctggttttaagctaaaagactgtgttatgtatgcatcagctgtagtgttactaatccttatgacagcaagaactgtgtatgatgatggtgctaggagagtgtggacacttatgaatgtcttgacactcgtttataaagtttattatggtaatgctttagatcaagccatttccatgtgggctcttataatctctgttacttctaactactcaggtgtagttacaactgtcatgtttttggccagaggtattgtttttatgtgtgttgagtattgccctattttcttcataactggtaatacacttcagtgtataatgctagtttattgtttcttaggctatttttgtacttgttactttggcctcttttgtttactcaaccgctactttagactgactcttggtgtttatgattacttagtttctacacaggagtttagatatatgaattcacagggactactcccacccaagaatagcatagatgccttcaaactcaacattaaattgttgggtgttggtggcaaaccttgtatcaaagtagccactgtacagtctaaaatgtcagatgtaaagtgcacatcagtagtcttactctcagttttgcaacaactcagagtagaatcatcatctaaattgtgggctcaatgtgtccagttacacaatgacattctcttagctaaagatactactgaagcctttgaaaaaatggtttcactactttctgttttgctttccatgcagggtgctgtagacataaacaagctttgtgaagaaatgctggacaacagggcaaccttacaagctatagcctcagagtttagttcccttccatcatatgcagcttttgctactgctcaagaagcttatgagcaggctgttgctaatggtgattctgaagttgttcttaaaaagttgaagaagtctttgaatgtggctaaatctgaatttgaccgtgatgcagccatgcaacgtaagttggaaaagatggctgatcaagctatgacccaaatgtataaacaggctagatctgaggacaagagggcaaaagttactagtgctatgcagacaatgcttttcactatgcttagaaagttggataatgatgcactcaacaacattatcaacaatgcaagagatggttgtgttcccttgaacataatacctcttacaacagcagccaaactaatggttgtcataccagactataacacatataaaaatacgtgtgatggtacaacatttacttatgcatcagcattgtgggaaatccaacaggttgtagatgcagatagtaaaattgttcaacttagtgaaattagtatggacaattcacctaatttagcatggcctcttattgtaacagctttaagggccaattctgctgtcaaattacagaataatgagcttagtcctgttgcactacgacagatgtcttgtgctgccggtactacacaaactgcttgcactgatgacaatgcgttagcttactacaacacaacaaagggaggtaggtttgtacttgcactgttatccgatttacaggatttgaaatgggctagattccctaagagtgatggaactggtactatctatacagaactggaaccaccttgtaggtttgttacagacacacctaaaggtcctaaagtgaagtatttatactttattaaaggattaaacaacctaaatagaggtatggtacttggtagtttagctgccacagtacgtctacaagctggtaatgcaacagaagtgcctgccaattcaactgtattatctttctgtgcttttgctgtagatgctgctaaagcttacaaagattatctagctagtgggggacaaccaatcactaattgtgttaagatgttgtgtacacacactggtactggtcaggcaataacagttacaccggaagccaatatggatcaagaatcctttggtggtgcatcgtgttgtctgtactgccgttgccacatagatcatccaaatcctaaaggattttgtgacttaaaaggtaagtatgtacaaatacctacaacttgtgctaatgaccctgtgggttttacacttaaaaacacagtctgtaccgtctgcggtatgtggaaaggttatggctgtagttgtgatcaactccgcgaacccatgcttcagtcagctgatgcacaatcgtttttaaacgggtttgcggtgtaagtgcagcccgtcttacaccgtgcggcacaggcactagtactgatgtcgtatacagggcttttgacatctacaatgataaagtagctggttttgctaaattcctaaaaactaattgttgtcgcttccaagaaaaggacgaagatgacaatttaattgattcttactttgtagttaagagacacactttctctaactaccaacatgaagaaacaatttataatttacttaaggattgtccagctgttgctaaacatgacttctttaagtttagaatagacggtgacatggtaccacatatatcacgtcaacgtcttactaaatacacaatggcagacctcgtctatgctttaaggcattttgatgaaggtaattgtgacacattaaaagaaatacttgtcacatacaattgttgtgatgatgattatttcaataaaaaggactggtatgattttgtagaaaacccagatatattacgcgtatacgccaacttaggtgaacgtgtacgccaagctttgttaaaaacagtacaattctgtgatgccatgcgaaatgctggtattgttggtgtactgacattagataatcaagatctcaatggtaactggtatgatttcggtgatttcatacaaaccacgccaggtagtggagttcctgttgtagattcttattattcattgttaatgcctatattaaccttgaccagggctttaactgcagagtcacatgttgacactgacttaacaaagccttacattaagtgggatttgttaaaatatgacttcacggaagagaggttaaaactctttgaccgttattttaaatattgggatcagacataccacccaaattgtgttaactgtttggatgacagatgcattctgcattgtgcaaactttaatgttttattctctacagtgttcccacttacaagttttggaccactagtgagaaaaatatttgttgatggtgttccatttgtagtttcaactggataccacttcagagagctaggtgttgtacataatcaggatgtaaatttacatagctctagacttagttttaaggaattacttgtgtatgctgctgaccctgctatgcacgctgcttctggtaatctattactagataaacgcactacgtgcttttcagtagctgcacttactaacaatgttgcttttcaaactgtcaaacccggtaattttaacaaagacttctatgactttgctgtgtctaagggtttctttaaggaaggaagttctgttgaattaaaacacttcttctttgctcaggatggtaatgctgctatcagcgattatgactactatcgttataatctaccaacaatgtgtgatatcagacaactactatttgtagttgaagttgttgataagtactttgattgttacgatggtggctgtattaatgctaaccaagtcatcgtcaacaacctagacaaatcagctggttttccatttaataaatggggtaaggctagactttattatgattcaatgagttatgaggatcaagatgcacttttcgcatatacaaaacgtaatgtcatccctactataactcaaatgaatcttaagtatgccattagtgcaaagaatagagctcgcaccgtagctggtgtctctatctgtagtactatgaccaatagacagtttcatcaaaaattattgaaatcaatagccgccactagaggagctactgtagtaattggaacaagcaaattctatggtggttggcacaacatgttaaaaactgtttatagtgatgtagaaaaccctcaccttatgggttgggattatcctaaatgtgatagagccatgcctaacatgcttagaattatggcctcacttgttcttgctcgcaaacatacaacgtgttgtagcttgtcacaccgtttctatagattagctaatgagtgtgctcaagtattgagtgaaatggtcatgtgtggcggttcactatatgttaaaccaggtggaacctcatcaggagatgccacaactgcttatgctaatagtgtttttaacatttgtcaagctgtcacggccaatgttaatgcacttttatctactgatggtaacaaaattgccgataagtatgtccgcaatttacaacacagactttatgagtgtctctatagaaatagagatgttgacacagactttgtgaatgagttttacgcatatttgcgtaaacatttctcaatgatgatactctctgacgatgctgttgtgtgtttcaatagcacttatgcatctcaaggtctagtggctagcataaagaactttaagtcagttctttattatcaaaacaatgtttttatgtctgaagcaaaatgttggactgagactgaccttactaaaggacctcatgaattttgctctcaacatacaatgctagttaaacagggtgatgattatgtgtaccttccttacccagatccatcaagaatcctaggggccggctgttttgtagatgatatcgtaaaaacagatggtacacttatgattgaacggttcgtgtctttagctatagatgcttacccacttactaaacatcctaatcaggagtatgctgatgtctttcatttgtacttacaatacataagaaagctacatgatgagttaacaggacacatgttagacatgtattctgttatgcttactaatgataacacttcaaggtattgggaacctgagttttatgaggctatgtacacaccgcatacagtcttacaggctgttggggcttgtgttctttgcaattcacagacttcattaagatgtggtgcttgcatacgtagaccattcttatgttgtaaatgctgttacgaccatgtcatatcaacatcacataaattagtcttgtctgttaatccgtatgtttgcaatgctccaggttgtgatgtcacagatgtgactcaactttacttaggaggtatgagctattattgtaaatcacataaaccacccattagttttccattgtgtgctaatggacaagtttttggtttatataaaaatacatgtgttggtagcgataatgttactgactttaatgcaattgcaacatgtgactggacaaatgctggtgattacattttagctaacacctgtactgaaagactcaagctttttgcagcagaaacgctcaaagctactgaggagacatttaaactgtcttatggtattgctactgtacgtgaagtgctgtctgacagagaattacatctttcatgggaagttggtaaacctagaccaccacttaaccgaaattatgtctttactggttatcgtgtaactaaaaacagtaaagtacaaataggagagtacacctttgaaaaaggtgactatggtgatgctgttgtttaccgaggtacaacaacttacaaattaaatgttggtgattattttgtgctgacatcacatacagtaatgccattaagtgcacctacactagtgccacaagagcactatgttagaattactggcttatacccaacactcaatatctcagatgagttttctagcaatgttgcaaattatcaaaaggttggtatgcaaaagtattctacactccagggaccacctggtactggtaagagtcattttgctattggcctagctctctactacccttctgctcgcatagtgtatacagcttgctctcatgccgctgttgatgcactatgtgagaaggcattaaaatatttgcctatagataaatgtagtagaattatacctgcacgtgctcgtgtagagtgttttgataaattcaaagtgaattcaacattagaacagtatgtcttttgtactgtaaatgcattgcctgagacgacagcagatatagttgtctttgatgaaatttcaatggccacaaattatgatttgagtgttgtcaatgccagattacgtgctaagcactatgtgtacattggcgaccctgctcaattacctgcaccacgcacattgctaactaagggcacactagaaccagaatatttcaattcagtgtgtagacttatgaaaactataggtccagacatgttcctcggaacttgtcggcgttgtcctgctgaaattgttgacactgtgagtgctttggtttatgataataagcttaaagcacataaagacaaatcagctcaatgctttaaaatgttttataagggtgttatcacgcatgatgtttcatctgcaattaacaggccacaaataggcgtggtaagagaattccttacacgtaaccctgcttggagaaaagctgtctttatttcaccttataattcacagaatgctgtagcctcaaagattttgggactaccaactcaaactgttgattcatcacagggctcagaatatgactatgtcatattcactcaaaccactgaaacagctcactcttgtaatgtaaacagatttaatgttgctattaccagagcaaaagtaggcatactttgcataatgtctgatagagacctttatgacaagttgcaatttacaagtcttgaaattccacgtaggaatgtggcaactttacaagctgaaaatgtaacaggactctttaaagattgtagtaaggtaatcactgggttacatcctacacaggcacctacacacctcagtgttgacactaaattcaaaactgaaggtttatgtgttgacatacctggcatacctaaggacatgacctatagaagactcatctctatgatgggttttaaaatgaattatcaagttaatggttaccctaacatgtttatcacccgcgaagaagctataagacatgtacgtgcatggattggcttcgatgtcgaggggtgtcatgctactagagaagctgttggtaccaatttacctttacagctaggtttttctacaggtgttaacctagttgctgtacctacaggttatgttgatacacctaataatacagatttttccagagttagtgctaaaccaccgcctggagatcaatttaaacacctcataccacttatgtacaaaggacttccttggaatgtagtgcgtataaagattgtacaaatgttaagtgacacacttaaaaatctctctgacagagtcgtatttgtcttatgggcacatggctttgagttgacatctatgaagtattttgtgaaaataggacctgagcgcacctgttgtctatgtgatagacgtgccacatgcttttccactgcttcagacacttatgcctgttggcatcattctattggatttgattacgtctataatccgtttatgattgatgttcaacaatggggttttacaggtaacctacaaagcaaccatgatctgtattgtcaagtccatggtaatgcacatgtagctagttgtgatgcaatcatgactaggtgtctagctgtccacgagtgctttgttaagcgtgttgactggactattgaatatcctataattggtgatgaactgaagattaatgcggcttgtagaaaggttcaacacatggttgttaaagctgcattattagcagacaaattcccagttcttcacgacattggtaaccctaaagctattaagtgtgtacctcaagctgatgtagaatggaagttctatgatgcacagccttgtagtgacaaagcttataaaatagaagaattattctattcttatgccacacattctgacaaattcacagatggtgtatgcctattttggaattgcaatgtcgatagatatcctgctaattccattgtttgtagatttgacactagagtgctatctaaccttaacttgcctggttgtgatggtggcagtttgtatgtaaataaacatgcattccacacaccagcttttgataaaagtgcttttgttaatttaaaacaattaccatttttctattactctgacagtccatgtgagtctcatggaaaacaagtagtgtcagatatagattatgtaccactaaagtctgctacgtgtataacacgttgcaatttaggtggtgctgtctgtagacatcatgctaatgagtacagattgtatctcgatgcttataacatgatgatctcagctggctttagcttgtgggtttacaaacaatttgatacttataacctctggaacacttttacaagacttcagagtttagaaaatgtggcttttaatgttgtaaataagggacactttgatggacaacagggtgaagtaccagtttctatcattaataacactgtttacacaaaagttgatggtgttgatgtagaattgtttgaaaataaaacaacattacctgttaatgtagcatttgagctttgggctaagcgcaacattaaaccagtaccagaggtgaaaatactcaataatttgggtgtggacattgctgctaatactgtgatctgggactacaaaagagatgctccagcacatatatctactattggtgtttgttctatgactgacatagccaagaaaccaactgaaacgatttgtgcaccactcactgtcttttttgatggtagagttgatggtcaagtagacttatttagaaatgcccgtaatggtgttcttattacagaaggtagtgttaaaggtttacaaccatctgtaggtcccaaacaagctagtcttaatggagtcacattaattggagaagccgtaaaaacacagttcaattattataagaaagttgatggtgttgtccaacaattacctgaaacttactttactcagagtagaaatttacaagaatttaaacccaggagtcaaatggaaattgatttcttagaattagctatggatgaattcattgaacggtataaattagaaggctatgccttcgaacatatcgtttatggagattttagtcatagtcagttaggtggtttacatctactgattggactagctaaacgttttaaggaatcaccttttgaattagaagattttattcctatggacagtacagttaaaaactatttcataacagatgcgcaaacaggttcatctaagtgtgtgtgttctgttattgatttattacttgatgattttgttgaaataataaaatcccaagatttatctgtagtttctaaggttgtcaaagtgactattgactatacagaaatttcatttatgctttggtgtaaagatggccatgtagaaacattttacccaaaattacaatctagtcaagcgtggcaaccgggtgttgctatgcctaatctttacaaaatgcaaagaatgctattagaaaagtgtgaccttcaaaattatggtgatagtgcaacattacctaaaggcataatgatgaatgtcgcaaaatatactcaactgtgtcaatatttaaacacattaacattagctgtaccctataatatgagagttatacattttggtgctggttctgataaaggagttgcaccaggtacagctgttttaagacagtggttgcctacgggtacgctgcttgtcgactcagatcttaatgactttgtctctgatgcagattcaactttgattggtgattgtgcaactgtacatacagctaataaatgggatctcattattagtgatatgtacgaccctaagactaaaaatgttacaaaagaaaatgactctaaagagggttttttcacttacatttgtgggtttatacaacaaaagctagctcttggaggttccgtggctataaagataacagaacattcttggaatgctgatctttataagctcatgggacacttcgcatggtggacagcctttgttactaatgtgaatgcgtcatcatctgaagcatttttaattggatgtaattatcttggcaaaccacgcgaacaaatagatggttatgtcatgcatgcaaattacatattttggaggaatacaaatccaattcagttgtcttcctattctttatttgacatgagtaaatttccccttaaattaaggggtactgctgttatgtctttaaaagaaggtcaaatcaatgatatgattttatctcttcttagtaaaggtagacttataattagagaaaacaacagagttgttatttctagtgatgttcttgttaacaactaaacgaacaatgtttgtttttcttgttttattgccactagtctctagtcagtgtgttaatcttacaaccagaactcaattaccccctgcatacactaattctttcacacgtggtgtttattaccctgacaaagttttcagatcctcagttttacattcaactcaggacttgttcttacctttcttttccaatgttacttggttccatgctatacatgtctctgggaccaatggtactaagaggtttgataaccctgtcctaccatttaatgatggtgtttattttgcttccactgagaagtctaacataataagaggctggatttttggtactactttagattcgaagacccagtccctacttattgttaataacgctactaatgttgttattaaagtctgtgaatttcaattttgtaatgatccatttttgggtgtttattaccacaaaaacaacaaaagttggatggaaagtgagttcagagtttattctagtgcgaataattgcacttttgaatatgtctctcagccttttcttatggaccttgaaggaaaacagggtaatttcaaaaatcttagggaatttgtgtttaagaatattgatggttattttaaaatatattctaagcacacgcctattaatttagtgcgtgatctccctcagggtttttcggctttagaaccattggtagatttgccaataggtattaacatcactaggtttcaaactttacttgctttacatagaagttatttgactcctggtgattcttcttcaggttggacagctggtgctgcagcttattatgtgggttatcttcaacctaggacttttctattaaaatataatgaaaatggaaccattacagatgctgtagactgtgcacttgaccctctctcagaaacaaagtgtacgttgaaatccttcactgtagaaaaaggaatctatcaaacttctaactttagagtccaaccaacagaatctattgttagatttcctaatattacaaacttgtgcccttttggtgaagtttttaacgccaccagatttgcatctgtttatgcttggaacaggaagagaatcagcaactgtgttgctgattattctgtcctatataattccgcatcattttccacttttaagtgttatggagtgtctcctactaaattaaatgatctctgctttactaatgtctatgcagattcatttgtaattagaggtgatgaagtcagacaaatcgctccagggcaaactggaaagattgctgattataattataaattaccagatgattttacaggctgcgttatagcttggaattctaacaatcttgattctaaggttggtggtaattataattacctgtatagattgtttaggaagtctaatctcaaaccttttgagagagatatttcaactgaaatctatcaggccggtagcacaccttgtaatggtgttgaaggttttaattgttactttcctttacaatcatatggtttccaacccactaatggtgttggttaccaaccatacagagtagtagtactttcttttgaacttctacatgcaccagcaactgtttgtggacctaaaaagtctactaatttggttaaaaacaaatgtgtcaatttcaacttcaatggtttaacaggcacaggtgttcttactgagtctaacaaaaagtttctgcctttccaacaatttggcagagacattgctgacactactgatgctgtccgtgatccacagacacttgagattcttgacattacaccatgttcttttggtggtgtcagtgttataacaccaggaacaaatacttctaaccaggttgctgttctttatcagggtgttaactgcacagaagtccctgttgctattcatgcagatcaacttactcctacttggcgtgtttattctacaggttctaatgtttttcaaacacgtgcaggctgtttaataggggctgaacatgtcaacaactcatatgagtgtgacatacccattggtgcaggtatatgcgctagttatcagactcagactaattctcctcggcgggcacgtagtgtagctagtcaatccatcattgcctacactatgtcacttggtgcagaaaattcagttgcttactctaataactctattgccatacccacaaattttactattagtgttaccacagaaattctaccagtgtctatgaccaagacatcagtagattgtacaatgtacatttgtggtgattcaactgaatgcagcaatcttttgttgcaatatggcagtttttgtacacaattaaaccgtgctttaactggaatagctgttgaacaagacaaaaacacccaagaagtttttgcacaagtcaaacaaatttacaaaacaccaccaattaaagattttggtggttttaatttttcacaaatattaccagatccatcaaaaccaagcaagaggtcatttattgaagatctacttttcaacaaagtgacacttgcagatgctggcttcatcaaacaatatggtgattgccttggtgatattgctgctagagacctcatttgtgcacaaaagtttaacggccttactgttttgccacctttgctcacagatgaaatgattgctcaatacacttctgcactgttagcgggtacaatcacttctggttggacctttggtgcaggtgctgcattacaaataccatttgctatgcaaatggcttataggtttaatggtattggagttacacagaatgttctctatgagaaccaaaaattgattgccaaccaatttaatagtgctattggcaaaattcaagactcactttcttccacagcaagtgcacttggaaaacttcaagatgtggtcaaccaaaatgcacaagctttaaacacgcttgttaaacaacttagctccaattttggtgcaatttcaagtgttttaaatgatatcctttcacgtcttgacaaagttgaggctgaagtgcaaattgataggttgatcacaggcagacttcaaagtttgcagacatatgtgactcaacaattaattagagctgcagaaatcagagcttctgctaatcttgctgctactaaaatgtcagagtgtgtacttggacaatcaaaaagagttgatttttgtggaaagggctatcatcttatgtccttccctcagtcagcacctcatggtgtagtcttcttgcatgtgacttatgtccctgcacaagaaaagaacttcacaactgctcctgccatttgtcatgatggaaaagcacactttcctcgtgaaggtgtctttgtttcaaatggcacacactggtttgtaacacaaaggaatttttatgaaccacaaatcattactacagacaacacatttgtgtctggtaactgtgatgttgtaataggaattgtcaacaacacagtttatgatcctttgcaacctgaattagactcattcaaggaggagttagataaatattttaagaatcatacatcaccagatgttgatttaggtgacatctctggcattaatgcttcagttgtaaacattcaaaaagaaattgaccgcctcaatgaggttgccaagaatttaaatgaatctctcatcgatctccaagaacttggaaagtatgagcagtatataaaatggccatggtacatttggctaggttttatagctggcttgattgccatagtaatggtgacaattatgctttgctgtatgaccagttgctgtagttgtctcaagggctgttgttcttgtggatcctgctgcaaatttgatgannncgactctgagccagtgctcaaaggagtcaaattacattacacataaacgaacttatggatttgtttatgagaatcttcacaattggaactgtaactttgaagcaaggtgaaatcaaggatgctactccttcagattttgttcgcgctactgcaacgataccgatacaagcctcactccctttcggatggcttattgttggcgttgcacttcttgctgtttttcagagcgcttccaaaatcataaccctcaaaaagagatggcaactagcactctccaagggtgttcactttgtttgcaacttgctgttgttgtttgtaacagtttactcacaccttttgctcgttgctgctggccttgaagccccttttctctatctttatgctttagtctacttcttgcagagtataaactttgtaagaataataatgaggctttggctttgctggaaatgccgttccaaaaacccattactttatgatgccaactattttctttgctggcatactaattgttacgactattgtataccttacaatagtgtaacttcttcaattgtcattacttcaggtgatggcacaacaagtcctatttctgaacatgactaccagattggtggttatactgaaaaatgggaatctggagtaaaagactgtgttgtattacacagttacttcacttcagactattaccagctgtactcaactcaattgagtacagacactggtgttgaacatgttaccttcttcatctacaataaaattgttgatgagcctgaagaacatgtccaaattcacacaatcgacggttcatccggagttgttaatccagtaatggaaccaatttatgatgaaccgacgacgactactagcgtgcctttgtaagcacaagctgatgagtacgaacttatgtactcattcgtttcggaagagacaggtacgttaatagttaatagcgtacttctttttcttgctttcgtggtattcttgctagttacactagccatccttactgcgcttcgattgtgtgcgtactgctgcaatattgttaacgtgagtcttgtaaaaccttctttttacgtttactctcgtgttaaaaatctgaattcttctagagttcctgatcttccggtctaaacgaactaaatattatattagtttttctgtttggaactttaattttagccatggcagattccaacggtactattaccgttgaagagcttaaaaagctccttgaacaatggaacctagtaataggtttcctattccttacatggatttgtcttctacaatttgcctatgccaacaggaataggtttttgtatataattaagttaattttcctctggctgttatggccagtaactttagcttgttttgtgcttgctgctgtttacagaataaattggatcaccggtggaattgctatcgcaatggcttgtcttgtaggcttgatgtggctcagctacttcattgcttctttcagactgtttgcgcgtacgcgttccatgtggtcattcaatccagaaactaacattcttctcaacgtgccactccatggcactattctgaccagaccgcttctagaaagtgaactcgtaatcggagctgtgatccttcgtggacatcttcgtattgctggacaccatctaggacgctgtgacatcaaggacctgcctaaagaaatcactgttgctacatcacgaacgctttcttattacaaattgggagcttcgcagcgtgtagcaggtgactcaggttttgctgcatacagtcgctacaggattggcaactataaattaaacacagaccattccagtagcagtgacaatattgctttgcttgtacagtaagtgacaacagatgtttcatctcgttgactttcaggttactatagcagagatattactaattattatgaggacttttaaagtttccatttggaatcttgattacatcataaacctcataattaaaaatttatctaagtcactaactgagaataaatattctcaattagatgaagagcaaccaatggagattgattaaacgaacatgaaaattattcttttcttggcactgataacactcgctacttgtgagctttatcactaccaagagtgtgttagaggtacaacagtacttttaaaagaaccttgctcttctggaacatacgagggcaattcaccatttcatcctctagctgataacaaatttgcactgacttgctttagcactcaatttgcttttgcttgtcctgacggcgtaaaacacgtctatcagttacgtgccagatcagtttcacctaaactgttcatcagacaagaggaagttcaagaactttactctccaatttttcttattgttgcggcaatagtgtttataacactttgcttcacactcaaaagaaagacagaatgattgaactttcattaattgacttctatttgtgctttttagcctttctgctattccttgttttaattatgcttattatcttttggttctcacttgaactgcaagatcataatgaaacttgtcacgcctaaacgaacatgaaatttcttgttttcttaggaatcatcacaactgtagctgcatttcaccaagaatgtagtttacagtcatgtactcaacatcaaccatatgtagttgatgacccgtgtcctattcacttctattctaaatggtatattagagtaggagctagaaaatcagcacctttaattgaattgtgcgtggatgaggctggttctaaatcacccattcagtacatcgatatcggtaattatacagtttcctgtttaccttttacaattaattgccaggaacctaaattgggtagtcttgtagtgcgttgttcgttctatgaagactttttagagtatcatgacgttcgtgttgttttagatttcatctaaacgaacaaactaaaatgtctgataatggaccccaaaatcagcgaaatgcaccccgcattacgtttggtggaccctcagattcaactggcagtaaccagaatggagaacgcagtggggcgcgatcaaaacaacgtcggccccaaggtttacccaataatactgcgtcttggttcaccgctctcactcaacatggcaaggaagaccttaaattccctcgaggacaaggcgttccaattaacaccaatagcagtccagatgaccaaattggctactaccgaagagctaccagacgaattcgtggtggtgacggtaaaatgaaagatctcagtccaagatggtatttctactacctaggaactgggccagaagctggacttccctatggtgctaacaaagacggcatcatatgggttgcaactgagggagccttgaatacaccaaaagatcacattggcacccgcaatcctgctaacaatgctgcaatcgtgctacaacttcctcaaggaacaacattgccaaaaggcttctacgcagaagggagcagaggcggcagtcaagcctcttctcgttcctcatcacgtagtcgcaacagttcaagaaattcaactccaggcagcagtaggggaacttctcctgctagaatggctggcaatggcggtgatgctgctcttgctttgctgctgcttgacagattgaaccagcttgagagcaaaatgtctggtaaaggccaacaacaacaaggccaaactgtcactaagaaatctgctgctgaggcttctaagaagcctcggcaaaaacgtactgccactaaagcatacaatgtaacacaagctttcggcagacgtggtccagaacaaacccaaggaaattttggggaccaggaactaatcagacaaggaactgattacaaacattggccgcaaattgcacaatttgcccccagcgcttcagcgttcttcggaatgtcgcgcattggcatggaagtcacaccttcgggaacgtggttgacctacacaggtgccatcaaattggatgacaaagatccaaatttcaaagatcaagtcattttgctgaataagcatattgacgcatacaaaacattcccaccaacagagcctaaaaaggacaaaaagaagaaggctgatgaaactcaagccttaccgcagagacagaagaaacagcaaactgtgactcttcttcctgctgcagatttggatgatttctccaaacaattgcaacaatccatgagcagtgctgactcaactcaggcctaaactcatgcagaccacacaaggcagatgggctatataaacgttttcgcttttccgtttacgatatatagtctactcttgtgcagaatgaattctcgtaactacatagcacaagtagatgtagttaactttaatctcacatagcaatctttaatcagtgtgtaacattagggaggacttgaaagagccaccacattttcaccgaggccacgcggagtacgatcgagtgtacagtgaacaatgctagggagagctgcctatatggaagagccctaatgtgtaaaattaattttagtagtgctatccccatgtga

SEQ ID NO: 52 - DNA, 29805 bp, synthetic construct
  misc_feature 1..29805: note = Reconstituted virus 15
  source 1..29805: mol_type = other DNA
actttcgatctcttgtagatctgttctctaaacgaactttaaaatctgtgtggctgtcactcggctgcatgcttagtgcactcacgcagtataattaataactaattactgtcgttgacaggacacgagtaactcgtctatcttctgcaggctgcttacggtttcgtccgtgttgcagccgatcatcagcacatctaggttttgtccgggtgtgaccgaaaggtaagatggagagccttgtccctggtttcaacgagaaaacacacgtccaactcagtttgcctgttttacaggttcgcgacgtgctcgtacgtggctttggagactccgtggaggaggtcttatcagaggcacgtcaacatcttaaagatggcacttgtggcttagtagaagttgaaaaaggcgttttgcctcaacttgaacagccctatgtgttcatcaaacgttcggatgctcgaactgcacctcatggtcatgttatggttgagctggtagcagaactcgaaggcattcagtacggtcgtagtggtgagacacttggtgtccttgtccctcatgtgggcgaaataccagtggcttaccgcaaggttcttcttcgtaagaacggtaataaaggagctggtggccatagttacggcgccgatctaaagtcatttgacttaggcgacgagcttggcactgatccttatgaagattttcaagaaaactggaacactaaacatagcagtggtgttacccgtgaactcatgcgtgagcttaacggaggggcatacactcgctatgtcgataacaacttctgtggccctgatggctaccctcttgagtgcattaaagaccttctagcacgtgctggtaaagcttcatgcactttgtccgaacaactggactttattgacactaagaggggtgtatactgctgccgtgaacatgagcatgaaattgcttggtacacggaacgttctgaaaagagctatgaattgcagacaccttttgaaattaaattggcaaagaaatttgacaccttcaatggggaatgtccaaattttgtatttcccttaaattccataatcaagactattcaaccaagggttgaaaagaaaaagcttgatggctttatgggtagaattcgatctgtctatccagttgcgtcaccaaatgaatgcaaccaaatgtgcctttcaactctcatgaagtgtgatcattgtggtgaaacttcatggcagacgggcgattttgttaaagccacttgcgaattttgtggcactgagaatttgactaaagaaggtgccactacttgtggttacttaccccaaaatgctgttgttaaaatttattgtccagcatgtcacaattcagaagtaggacctgagcatagtcttgccgaataccataatgaatctggcttgaaaaccattcttcgtaagggtggtcgcactattgcctttggaggctgtgtgttctcttatgttggttgccataacaagtgtgcctattgggttccacgtgctagcgctaacataggttgtaaccatacaggtgttgttggagaaggttccgaaggtcttaatgacaaccttcttgaaatactccaaaaagagaaagtcaacatcaatattgttggtgactttaaacttaatgaagagatcgccattattttggcatctttttctgcttccacaagtgcttttgtggaaactgtgaaaggtttggattataaagcattcaaacaaattgttgaatcctgtggtaattttaaagttacaaaaggaaaagctaaaaaaggtgcctggaatattggtgaacagaaatcaatactgagtcctctttatgcatttgcatcagaggctgctcgtgttgtacgatcaattttctcccgcactcttgaaactgctcaaaattctgtgcgtgttttacagaaggccgctataacaatactagatggaatttcacagtattcactgagactcattgatgctatgatgttcacatctgatttggctactaacaatctagttgtaatggcctacattacaggtggtgttgttcagttgacttcgcagtggctaactaacatctttggcactgtttatgaaaaactcaaacccgtccttgattggcttgaagagaagtttaaggaaggtgtagagtttcttagagacggttgggaaattgttaaatttatctcaacctgtgcttgtgaaattgtcggtggacaaattgtcacctgtgcaaaggaaattaaggagagtgttcagacattctttaagcttgtaaataaatttttggctttgtgtgctgactctatcattattggtggagctaaacttaaagccttgaatttaggtgaaacatttgtcacgcactcaaagggattgtacagaaagtgtgttaaatccagagaagaaactggcctactcatgcctctaaaagccccaaaagaaattatcttcttagagggagaaacacttcccacagaagtgttaacagaggaagttgtcttgaaaactggtgatttacaaccattagaacaacctactagtgaagctgttgaagctccattggttggtacaccagtttgtattaacgggcttatgttgctcgaaatcaaagacacagaaaagtactgtgcccttgcacctaatatgatggtaacaaacaataccttcacactcaaaggcggtgcaccaacaaaggttacttttggtgatgacactgtgatagaagtgcaaggttacaagagtgtgaatatcacttttgaacttgatgaaaggattgataaagtacttaatgagaagtgctctgcctatacagttgaactcggtacagaagtaaatgagttcgcctgtgttgtggcagatgctgtcataaaaactttgcaaccagtatctgaattacttacaccactgggcattgatttagatgagtggagtatggctacatactacttatttgatgagtctggtgagtttaaattggcttcacatatgtattgttctttttaccctccagatgaggatgaagaagaaggtgattgtgaagaagaagagtttgagccatcaactcaatatgagtatggtactgaagatgattaccaaggtaaacctttggaatttggtgccacttctgctgctcttcaacctgaagaagagcaagaagaagattggttagatgatgatagtcaacaaactgttggtcaacaagacggcagtgaggacaatcagacaactactattcaaacaattgttgaggttcaacctcaattagagatggaacttacaccagttgttcagactattgaagtgaatagttttagtggttatttaaaacttactgacaatgtatacattaaaaatgcagacattgtggaagaagctaaaaaggtaaaaccaacagtggttgttaatgcagccaatgtttaccttaaacatggaggaggtgttgcaggagccttaaataaggctactaacaatgccatgcaagttgaatctgatgattacatagctactaatggaccacttaaagtgggtggtagttgtgttttaagcggacacaatcttgctaaacactgtcttcatgttgtcggcccaaatgttaacaaaggtgaagacattcaacttcttaagagtgcttatgaaaattttaatcagcacgaagttctacttgcaccattattatcagctggtatttttggtgctgaccctatacattctttaagagtttgtgtagatactgttcgcacaaatgtctacttagctgtctttgataaaaatctctatgacaaacttgtttcaagctttttggaaatgaagagtgaaaagcaagttgaacaaaagatcgctgagattcctaaagaggaagttaagccatttataactgaaagtaaaccttcagttgaacagagaaaacaagatgataagaaaatcaaagcttgtgttgaagaagttacaacaactctggaagaaactaagttcctcacagaaaacttgttactttatattgacattaatggcaatcttcatccagattctgccactcttgttagtgacattgacatcactttcttaaagaaagatgctccatatatagtgggtgatgttgttcaagagggtgttttaactgctgtggttatacctactaaaaaggctggtggcactactgaaatgctagcgaaagctttgagaaaagtgccaacagacaattatataaccacttacccgggtcagggtttaaatggttacactgtagaggaggcaaagacagtgcttaaaaagtgtaaaagtgccttttacattctaccatctattatctctaatgagaagcaagaaattcttggaactgtttcttggaatttgcgagaaatgcttgcacatgcagaagaaacacgcaaattaatgcctgtctgtgtggaaactaaagccatagtttcaactatacagcgtaaatataagggtattaaaatacaagagggtgtggttgattatggtgctagattttacttttacaccagtaaaacaactgtagcgtcacttatcaacacacttaacgatctaaatgaaactcttgttacaatgccacttggctatgtaacacatggcttaaatttggaagaagctgctcggtatatgagatctctcaaagtgccagctacagtttctgtttcttcacctgatgctgttacagcgtataatggttatcttacttcttcttctaaaacacctgaagaacattttattgaaaccatctcacttgctggttcctataaagattggtcctattctggacaatctacacaactaggtatagaatttcttaagagaggtgataaaagtgtatattacactagtaatcctaccacattccacctagatggtgaagttatcacctttgacaatcttaagacacttctttctttgagagaagtgaggactattaaggtgtttacaacagtagacaacattaacctccacacgcaagttgtggacatgtcaatgacatatggacaacagtttggtccaacttatttggatggagctgatgttactaaaataaaacctcataattcacatgaaggtaaaacattttatgttttacctaatgatgacactctacgtgttgaggcttttgagtactaccacacaactgatcctagttttctgggtaggtacatgtcagcattaaatcacactaaaaagtggaaatacccacaagttaatggtttaacttctattaaatgggcagataacaactgttatcttgccactgcattgttaacactccaacaaatagagttgaagtttaatccacctgctctacaagatgcttattacagagcaagggctggtgaagctgctaacttttgtgcacttatcttagcctactgtaataagacagtaggtgagttaggtgatgttagagaaacaatgagttacttgtttcaacatgccaatttagattcttgcaaaagagtcttgaacgtggtgtgtaaaacttgtggacaacagcagacaacccttaagggtgtagaagctgttatgtacatgggcacactttcttatgaacaatttaagaaaggtgttcagataccttgtacgtgtggtaaacaagctacaaaatatctagtacaacaggagtcaccttttgttatgatgtcagcaccacctgctcagtatgaacttaagcatggtacatttacttgtgctagtgagtacactggtaattaccagtgtggtcactataaacatataacttctaaagaaactttgtattgcatagacggtgctttacttacaaagtcctcagaatacaaaggtcctattacggatgttttctacaaagaaaacagttacacaacaaccataaaaccagttacttataaattggatggtgttgtttgtacagaaattgaccctaagttggacaattattataagaaagacaattcttatttcacagagcaaccaattgatcttgtaccaaaccaaccatatccaaacgcaagcttcgataattttaagtttgtatgtgataatatcaaatttgctgatgatttaaaccagttaactggttataagaaacctgcttcaagagagcttaaagttacatttttccctgacttaaatggtgatgtggtggctattgattataaacactacacaccctcttttaagaaaggagctaaattgttacataaacctattgtttggcatgttaacaatgcaactaataaagccacgtataaaccaaatacctggtgtatacgttgtctttggagcacaaaaccagttgaaacatcaaattcgtttgatgtactgaagtcagaggacgcgcagggaatggataatcttgcctgcgaagatctaaaaccagtctctgaagaagtagtggaaaatcctaccatacagaaagacgttcttgagtgtaatgtgaaaactaccgaagttgtaggagacattatacttaaaccagcaaataatagtttaaaaattacagaagaggttggccacacagatctaatggctgcttatgtagacaattctagtcttactattaagaaacctaatgaattatctagagtattaggtttgaaaacccttgctactcatggtttagctgctgttaatagtgtcccttgggatactatagctaattatgctaagccttttcttaacaaagttgttagtacaactactaacatagttacacggtgtttaaaccgtgtttgtactaattatatgccttatttctttactttattgctacaattgtgtacttttactagaagtacaaattctagaattaaagcatctatgccgactactatagcaaagaatactgttaagagtgtcggtaaattttgtctagaggcttcatttaattatttgaagtcacctaatttttctaaactgataaatattataatttggtttttactattaagtgtttgcctaggttctttaatctactcaaccgctgctttaggtgttttaatgtctaatttaggcatgccttcttactgtactggttacagagaaggctatttgaactctactaatgtcactattgcaacctactgtactggttctataccttgtagtgtttgtcttagtggtttagattctttagacacctatccttctttagaaactatacaaattaccatttcatcttttaaatgggatttaactgcttttggcttagttgcagagtggtttttggcatatattcttttcactaggtttttctatgtacttggattggctgcaatcatgcaattgtttttcagctattttgcagtacattttattagtaattcttggcttatgtggttaataattaatcttgtacaaatggccccgatttcagctatggttagaatgtacatcttctttgcatcattttattatgtatggaaaagttatgtgcatgttgtagacggttgtaattcatcaacttgtatgatgtgttacaaacgtaatagagcaacaagagtcgaatgtacaactattgttaatggtgttagaaggtccttttatgtctatgctaatggaggtaaaggcttttgcaaactacacaattggaattgtgttaattgtgatacattctgtgctggtagtacatttattagtgatgaagttgcgagagacttgtcactacagtttaaaagaccaataaatcctactgaccagtcttcttacatcgttgatagtgttacagtgaagaatggttccatccatctttactttgataaagctggtcaaaagacttatgaaagacattctctctctcattttgttaacttagacaacctgagagctaataacactaaaggttcattgcctattaatgttatagtttttgatggtaaatcaaaatgtgaagaatcatctgcaaaatcagcgtctgtttactacagtcagcttatgtgtcaacctatactgttactagatcaggcattagtgtctgatgttggtgatagtgcggaagttgcagttaaaatgtttgatgcttacgttaatacgttttcatcaacttttaacgtaccaatggaaaaactcaaaacactagttgcaactgcagaagctgaacttgcaaagaatgtgtccttagacaatgtcttatctacttttatttcagcagctcggcaagggtttgttgattcagatgtagaaactaaagatgttgttgaatgtcttaaattgtcacatcaatctgacatagaagttactggcgatagttgtaataactatatgctcacctataacaaagttgaaaacatgacaccccgtgaccttggtgcttgtattgactgtagtgcgcgtcatattaatgcgcaggtagcaaaaagtcacaacattgctttgatatggaacgttaaagatttcatgtcattgtctgaacaactacgaaaacaaatacgtagtgctgctaaaaagaataacttaccttttaagttgacatgtgcaactactagacaagttgttaatgttgtaacaacaaagatagcacttaagggtggtaaaattgttaataattggttgaagcagttaattaaagttacacttgtgttcctttttgttgctgctattttctatttaataacacctgttcatgtcatgtctaaacatactgacttttcaagtgaaatcataggatacaaggctattgatggtggtgtcactcgtgacatagcatctacagatacttgttttgctaacaaacatgctgattttgacacatggtttagccagcgtggtggtagttatactaatgacaaagcttgcccattgattgctgcagtcataacaagagaagtgggttttgtcgtgcctggtttgcctggcacgatattacgcacaactaatggtgactttttgcatttcttacctagagtttttagtgcagttggtaacatctgttacacaccatcaaaacttatagagtacactgactttgcaacatcagcttgtgttttggctgctgaatgtacaatttttaaagatgcttctggtaagccagtaccatattgttatgataccaatgtactagaaggttctgttgcttatgaaagtttacgccctgacacacgttatgtgctcatggatggctctattattcaatttcctaacacctaccttgaaggttctgttagagtggtaacaacttttgattctgagtactgtaggcacggcacttgtgaaagatcagaagctggtgtttgtgtatctactagtggtagatgggtacttaacaatgattattacagatctttaccaggagttttctgtggtgtagatgctgtaaatttacttactaatatgtttacaccactaattcaacctattggtgctttggacatatcagcatctatagtagctggtggtattgtagctatcgtagtaacatgccttgcctactattttatgaggtttagaagagcttttggtgaatacagtcatgtagttgcctttaatactttactattccttatgtcattcactgtactctgtttaacaccagtttactcattcttacctggtgtttattctgttatttacttgtacttgacattttatcttactaatgatgtttcttttttagcacatattcagtggatggttatgttcacacctttagtacctttctggataacaattgcttatatcatttgtatttccacaaagcatttctattggttctttagtaattacctaaagagacgtgtagtctttaatggtgtttcctttagtacttttgaagaagctgcgctgtgcacctttttgttaaataaagaaatgtatctaaagttgcgtagtgatgtgctattacctcttacgcaatataatagatacttagctctttataataagtacaagtattttagtggagcaatggatacaactagctacagagaagctgcttgttgtcatctcgcaaaggctctcaatgacttcagtaactcaggttctgatgttctttaccaaccaccacaaacctctatcacctcagctgttttgcagagtggttttagaaaaatggcattcccatctggtaaagttgagggttgtatggtacaagtaacttgtggtacaactacacttaacggtctttggcttgatgacgtagtttactgtccaagacatgtgatctgcacctctgaagacatgcttaaccctaattatgaagatttactcattcgtaagtctaatcataatttcttggtacaggctggtaatgttcaactcagggttattggacattctatgcaaaattgtgtacttaagcttaaggttgatacagccaatcctaagacacctaagtataagtttgttcgcattcaaccaggacagactttttcagtgttagcttgttacaatggttcaccatctggtgtttaccaatgtgctatgaggcccaatttcactattaagggttcattccttaatggttcatgtggtagtgttggttttaacatagattatgactgtgtctctttttgttacatgcaccatatggaattaccaactggagttcatgctggcacagacttagaaggtaacttttatggaccttttgttgacaggcaaacagcacaagcagctggtacggacacaactattacagttaatgttttagcttggttgtacgctgctgttataaatggagacaggtggtttctcaatcgatttaccacaactcttaatgactttaaccttgtggctatgaagtacaattatgaacctctaacacaagaccatgttgacatactaggacctctttctgctcaaactggaattgccgttttagatatgtgtgcttcattaaaagaattactgcaaaatggtatgaatggacgtaccatattgggtagtgctttattagaagatgaatttacaccttttgatgttgttagacaatgctcaggtgttactttccaaagtgcagtgaaaagaacaatcaagggtacacaccactggttgttactcacaattttgacttcacttttagttttagtccagagtactcaatggtctttgttcttttttttgtatgaaaatgcctttttaccttttgctatgggtattattgctatgtctgcttttgcaatgatgtttgtcaaacataagcatgcatttctctgtttgtttttgttaccttctcttgccactgtagcttattttaatatggtctatatgcctgctagttgggtgatgcgtattatgacatggttggatatggttgatactagtttgtctggttttaagctaaaagactgtgttatgtatgcatcagctgtagtgttactaatccttatgacagcaagaactgtgtatgatgatggtgctaggagagtgtggacacttatgaatgtcttgacactcgtttataaagtttattatggtaatgctttagatcaagccatttccatgtgggctcttataatctctgttacttctaactactcaggtgtagttacaactgtcatgtttttggccagaggtattgtttttatgtgtgttgagtattgccctattttcttcataactggtaatacacttcagtgtataatgctagtttattgtttcttaggctatttttgtacttgttactttggcctcttttgtttactcaaccgctactttagactgactcttggtgtttatgattacttagtttctacacaggagtttagatatatgaattcacagggactactcccacccaagaatagcatagatgccttcaaactcaacattaaattgttgggtgttggtggcaaaccttgtatcaaagtagccactgtacagtctaaaatgtcagatgtaaagtgcacatcagtagtcttactctcagttttgcaacaactcagagtagaatcatcatctaaattgtgggctcaatgtgtccagttacacaatgacattctcttagctaaagatactactgaagcctttgaaaaaatggtttcactactttctgttttgctttccatgcagggtgctgtagacataaacaagctttgtgaagaaatgctggacaacagggcaaccttacaagctatagcctcagagtttagttcccttccatcatatgcagcttttgctactgctcaagaagcttatgagcaggctgttgctaatggtgattctgaagttgttcttaaaaagttgaagaagtctttgaatgtggctaaatctgaatttgaccgtgatgcagccatgcaacgtaagttggaaaagatggctgatcaagctatgacccaaatgtataaacaggctagatctgaggacaagagggcaaaagttactagtgctatgcagacaatgcttttcactatgcttagaaagttggataatgatgcactcaacaacattatcaacaatgcaagagatggttgtgttcccttgaacataatacctcttacaacagcagccaaactaatggttgtcataccagactataacacatataaaaatacgtgtgatggtacaacatttacttatgcatcagcattgtgggaaatccaacaggttgtagatgcagatagtaaaattgttcaacttagtgaaattagtatggacaattcacctaatttagcatggcctcttattgtaacagctttaagggccaattctgctgtcaaattacagaataatgagcttagtcctgttgcactacgacagatgtcttgtgctgccggtactacacaaactgcttgcactgatgacaatgcgttagcttactacaacacaacaaagggaggtaggtttgtacttgcactgttatccgatttacaggatttgaaatgggctagattccctaagagtgatggaactggtactatctatacagaactggaaccaccttgtaggtttgttacagacacacctaaaggtcctaaagtgaagtatttatactttattaaaggattaaacaacctaaatagaggtatggtacttggtagtttagctgccacagtacgtctacaagctggtaatgcaacagaagtgcctgccaattcaactgtattatctttctgtgcttttgctgtagatgctgctaaagcttacaaagattatctagctagtgggggacaaccaatcactaattgtgttaagatgttgtgtacacacactggtactggtcaggcaataacagttacaccggaagccaatatggatcaagaatcctttggtggtgcatcgtgttgtctgtactgccgttgccacatagatcatccaaatcctaaaggattttgtgacttaaaaggtaagtatgtacaaatacctacaacttgtgctaatgaccctgtgggttttacacttaaaaacacagtctgtaccgtctgcggtatgtggaaaggttatggctgtagttgtgatcaactccgcgaacccatgcttcagtcagctgatgcacaatcgtttttaaacgggtttgcggtgtaagtgcagcccgtcttacaccgtgcggcacaggcactagtactgatgtcgtatacagggcttttgacatctacaatgataaagtagctggttttgctaaattcctaaaaactaattgttgtcgcttccaagaaaaggacgaagatgacaatttaattgattcttactttgtagttaagagacacactttctctaactaccaacatgaagaaacaatttataatttacttaaggattgtccagctgttgctaaacatgacttctttaagtttagaatagacggtgacatggtaccacatatatcacgtcaacgtcttactaaatacacaatggcagacctcgtctatgctttaaggcattttgatgaaggtaattgtgacacattaaaagaaatacttgtcacatacaattgttgtgatgatgattatttcaataaaaaggactggtatgattttgtagaaaacccagatatattacgcgtatacgccaacttaggtgaacgtgtacgccaagctttgttaaaaacagtacaattctgtgatgccatgcgaaatgctggtattgttggtgtactgacattagataatcaagatctcaatggtaactggtatgatttcggtgatttcatacaaaccacgccaggtagtggagttcctgttgtagattcttattattcattgttaatgcctatattaaccttgaccagggctttaactgcagagtcacatgttgacactgacttaacaaagccttacattaagtgggatttgttaaaatatgacttcacggaagagaggttaaaactctttgaccgttattttaaatattgggatcagacataccacccaaattgtgttaactgtttggatgacagatgcattctgcattgtgcaaactttaatgttttattctctacagtgttcccacttacaagttttggaccactagtgagaaaaatatttgttgatggtgttccatttgtagtttcaactggataccacttcagagagctaggtgttgtacataatcaggatgtaaatttacatagctctagacttagttttaaggaattacttgtgtatgctgctgaccctgctatgcacgctgcttctggtaatctattactagataaacgcactacgtgcttttcagtagctgcacttactaacaatgttgcttttcaaactgtcaaacccggtaattttaacaaagacttctatgactttgctgtgtctaagggtttctttaaggaaggaagttctgttgaattaaaacacttcttctttgctcaggatggtaatgctgctatcagcgattatgactactatcgttataatctaccaacaatgtgtgatatcagacaactactatttgtagttgaagttgttgataagtactttgattgttacgatggtggctgtattaatgctaaccaagtcatcgtcaacaacctagacaaatcagctggttttccatttaataaatggggtaaggctagactttattatgattcaatgagttatgaggatcaagatgcacttttcgcatatacaaaacgtaatgtcatccctactataactcaaatgaatcttaagtatgccattagtgcaaagaatagagctcgcaccgtagctggtgtctctatctgtagtactatgaccaatagacagtttcatcaaaaattattgaaatcaatagccgccactagaggagctactgtagtaattggaacaagcaaattctatggtggttggcacaacatgttaaaaactgtttatagtgatgtagaaaaccctcaccttatgggttgggattatcctaaatgtgatagagccatgcctaatatgcttagaattatggcctcacttgttcttgctcgcaaacatacaacgtgttgtagcttgtcacaccgtttctatagattagctaatgagtgtgctcaagtattgagtgaaatggtcatgtgtggcggttcactatatgttaaaccaggtggaacctcatcaggagatgccacaactgcttatgctaatagtgtttttaacatttgtcaagctgtcacggccaatgttaatgcacttttatctactgatggtaacaaaattgccgataagtatgtccgcaatttacaacacagactttatgagtgtctctatagaaatagagatgttgacacagactttgtgaatgagttttacgcatatttgcgtaaacatttctcaatgatgatactctctgacgatgctgttgtgtgtttcaatagcacttatgcatctcaaggtctagtggctagcataaagaactttaagtcagttctttattatcaaaacaatgtttttatgtctgaagcaaaatgttggactgagactgaccttactaaaggacctcatgaattttgctctcaacatacaatgctagttaaacagggtgatgattatgtgtaccttccttacccagatccatcaagaatcctaggggccggctgttttgtagatgatatcgtaaaaacagatggtacacttatgattgaacggttcgtgtctttagctatagatgcttacccacttactaaacatcctaatcaggagtatgctgatgtctttcatttgtacttacaatacataagaaagctacatgatgagttaacaggacacatgttagacatgtattctgttatgcttactaatgataacacttcaaggtattgggaacctgagttttatgaggctatgtacacaccgcatacagtcttacaggctgttggggcttgtgttctttgcaattcacagacttcattaagatgtggtgcttgcatacgtagaccattcttatgttgtaaatgctgttacgaccatgtcatatcaacatcacataaattagtcttgtctgttaatccgtatgtttgcaatgctccaggttgtgatgtcacagatgtgactcaactttacttaggaggtatgagctattattgtaaatcacataaaccacccattagttttccattgtgtgctaatggacaagtttttggtttatataaaaatacatgtgttggtagcgataatgttactgactttaatgcaattgcaacatgtgactggacaaatgctggtgattacattttagctaacacctgtactgaaagactcaagctttttgcagcagaaacgctcaaagctactgaggagacatttaaactgtcttatggtattgctactgtacgtgaagtgctgtctgacagagaattacatctttcatgggaagttggtaaacctagaccaccacttaaccgaaattatgtctttactggttatcgtgtaactaaaaacagtaaagtacaaataggagagtacacctttgaaaaaggtgactatggtgatgctgttgtttaccgaggtacaacaacttacaaattaaatgttggtgattattttgtgctgacatcacatacagtaatgccattaagtgcacctacactagtgccacaagagcactatgttagaattactggcttatacccaacactcaatatctcagatgagttttctagcaatgttgcaaattatcaaaaggttggtatgcaaaagtattctacactccagggaccacctggtactggtaagagtcattttgctattggcctagctctctactacccttctgctcgcatagtgtatacagcttgctctcatgccgctgttgatgcactatgtgagaaggcattaaaatatttgcctatagataaatgtagtagaattatacctgcacgtgctcgtgtagagtgttttgataaattcaaagtgaattcaacattagaacagtatgtcttttgtactgtaaatgcattgcctgagacgacagcagatatagttgtctttgatgaaatttcaatggccacaaattatgatttgagtgttgtcaatgccagattacgtgctaagcactatgtgtacattggcgaccctgctcaattacctgcaccacgcacattgctaactaagggcacactagaaccagaatatttcaattcagtgtgtagacttatgaaaactataggtccagacatgttcctcggaacttgtcggcgttgtcctgctgaaattgttgacactgtgagtgctttggtttatgataataagcttaaagcacataaagacaaatcagctcaatgctttaaaatgttttataagggtgttatcacgcatgatgtttcatctgcaattaacaggccacaaataggcgtggtaagagaattccttacacgtaaccctgcttggagaaaagctgtctttatttcaccttataattcacagaatgctgtagcctcaaagattttgggactaccaactcaaactgttgattcatcacagggctcagaatatgactatgtcatattcactcaaaccactgaaacagctcactcttgtaatgtaaacagatttaatgttgctattaccagagcaaaagtaggcatactttgcataatgtctgatagagacctttatgacaagttgcaatttacaagtcttgaaattccacgtaggaatgtggcaactttacaagctgaaaatgtaacaggactctttaaagattgtagtaaggtaatcactgggttacatcctacacaggcacctacacacctcagtgttgacactaaattcaaaactgaaggtttatgtgttgacatacctggcatacctaaggacatgacctatagaagactcatctctatgatgggttttaaaatgaattatcaagttaatggttaccctaacatgtttatcacccgcgaagaagctataagacatgtacgtgcatggattggcttcgatgtcgaggggtgtcatgctactagagaagctgttggtaccaatttacctttacagctaggtttttctacaggtgttaacctagttgctgtacctacaggttatgttgatacacctaataatacagatttttccagagttagtgctaaaccaccgcctggagatcaatttaaacacctcataccacttatgtacaaaggacttccttggaatgtagtgcgtataaagattgtacaaatgttaagtgacacacttaaaaatctctctgacagagtcgtatttgtcttatgggcacatggctttgagttgacatctatgaagtattttgtgaaaataggacctgagcgcacctgttgtctatgtgatagacgtgccacatgcttttccactgcttcagacacttatgcctgttggcatcattctattggatttgattacgtctataatccgtttatgattgatgttcaacaatggggttttacaggtaacctacaaagcaaccatgatctgtattgtcaagtccatggtaatgcacatgtagctagttgtgatgcaatcatgactaggtgtctagctgtccacgagtgctttgttaagcgtgttgactggactattgaatatcctataattggtgatgaactgaagattaatgcggcttgtagaaaggttcaacacatggttgttaaagctgcattattagcagacaaattcccagttcttcacgacattggtaaccctaaagctattaagtgtgtacctcaagctgatgtagaatggaagttctatgatgcacagccttgtagtgacaaagcttataaaatagaagaattattctattcttatgccacacattctgacaaattcacagatggtgtatgcctattttggaattgcaatgtcgatagatatcctgctaattccattgtttgtagatttgacactagagtgctatctaaccttaacttgcctggttgtgatggtggcagtttgtatgtaaataaacatgcattccacacaccagcttttgataaaagtgcttttgttaatttaaaacaattaccatttttctattactctgacagtccatgtgagtctcatggaaaacaagtagtgtcagatatagattatgtaccactaaagtctgctacgtgtataacacgttgcaatttaggtggtgctgtctgtagacatcatgctaatgagtacagattgtatctcgatgcttataacatgatgatctcagctggctttagcttgtgggtttacaaacaatttgatacttataacctctggaacacttttacaagacttcagagtttagaaaatgtggcttttaatgttgtaaataagggacactttgatggacaacagggtgaagtaccagtttctatcattaataacactgtttacacaaaagttgatggtgttgatgtagaattgtttgaaaataaaacaacattacctgttaatgtagcatttgagctttgggctaagcgcaacattaaaccagtaccagaggtgaaaatactcaataatttgggtgtggacattgctgctaatactgtgatctgggactacaaaagagatgctccagcacatatatctactattggtgtttgttctatgactgacatagccaagaaaccaactgaaacgatttgtgcaccactcactgtcttttttgatggtagagttgatggtcaagtagacttatttagaaatgcccgtaatggtgttcttattacagaaggtagtgttaaaggtttacaaccatctgtaggtcccaaacaagctagtcttaatggagtcacattaattggagaagccgtaaaaacacagttcaattattataagaaagttgatggtgttgtccaacaattacctgaaacttactttactcagagtagaaatttacaagaatttaaacccaggagtcaaatggaaattgatttcttagaattagctatggatgaattcattgaacggtataaattagaaggctatgccttcgaacatatcgtttatggagattttagtcatagtcagttaggtggtttacatctactgattggactagctaaacgttttaaggaatcaccttttgaattagaagattttattcctatggacagtacagttaaaaactatttcataacagatgcgcaaacaggttcatctaagtgtgtgtgttctgttattgatttattacttgatgattttgttgaaataataaaatcccaagatttatctgtagtttctaaggttgtcaaagtgactattgactatacagaaatttcatttatgctttggtgtaaagatggccatgtagaaacattttacccaaaattacaatctagtcaagcgtggcaaccgggtgttgctatgcctaatctttacaaaatgcaaagaatgctattagaaaagtgtgaccttcaaaattatggtgatagtgcaacattacctaaaggcataatgatgaatgtcgcaaaatatactcaactgtgtcaatatttaaacacattaacattagctgtaccctataatatgagagttatacattttggtgctggttctgataaaggagttgcaccaggtacagctgttttaagacagtggttgcctacgggtacgctgcttgtcgactcagatcttaatgactttgtctctgatgcagattcaactttgattggtgattgtgcaactgtacatacagctaataaatgggatctcattattagtgatatgtacgaccctaagactaaaaatgttacaaaagaaaatgactctaaagagggttttttcacttacatttgtgggtttatacaacaaaagctagctcttggaggttccgtggctataaagataacagaacattcttggaatgctgatctttataagctcatgggacacttcgcatggtggacagcctttgttactaatgtgaatgcgtcatcatctgaagcatttttaattggatgtaattatcttggcaaaccacgcgaacaaatagatggttatgtcatgcatgcaaattacatattttggaggaatacaaatccaattcagttgtcttcctattctttatttgacatgagtaaatttccccttaaattaaggggtactgctgttatgtctttaaaagaaggtcaaatcaatgatatgattttatctcttcttagtaaaggtagacttataattagagaaaacaacagagttgttatttctagtgatgttcttgttaacaactaaacgaacaatgtttgtttttcttgttttattgccactagtctctagtcagtgtgttaatcttacaaccagaactcaattaccccctgcatacactaattctttcacacgtggtgtttattaccctgacaaagttttcagatcctcagttttacattcaactcaggacttgttcttacctttcttttccaatgttacttggttccatgctatacatgtctctgggaccaatggtactaagaggtttgataaccctgtcctaccatttaatgatggtgtttattttgcttccactgagaagtctaacataataagaggctggatttttggtactactttagattcgaagacccagtccctacttattgttaataacgctactaatgttgttattaaagtctgtgaatttcaattttgtaatgatccatttttgggtgtttattaccacaaaaacaacaaaagttggatggaaagtgagttcagagtttattctagtgcgaataattgcacttttgaatatgtctctcagccttttcttatggaccttgaaggaaaacagggtaatttcaaaaatcttagggaatttgtgtttaagaatattgatggttattttaaaatatattctaagcacacgcctattaatttagtgcgtgatctccctcagggtttttcggctttagaaccattggtagatttgccaataggtattaacatcactaggtttcaaactttacttgctttacatagaagttatttgactcctggtgattcttcttcaggttggacagctggtgctgcagcttattatgtgggttatcttcaacctaggacttttctattaaaatataatgaaaatggaaccattacagatgctgtagactgtgcacttgaccctctctcagaaacaaagtgtacgttgaaatccttcactgtagaaaaaggaatctatcaaacttctaactttagagtccaaccaacagaatctattgttagatttcctaatattacaaacttgtgcccttttggtgaagtttttaacgccaccagatttgcatctgtttatgcttggaacaggaagagaatcagcaactgtgttgctgattattctgtcctatataattccgcatcattttccacttttaagtgttatggagtgtctcctactaaattaaatgatctctgctttactaatgtctatgcagattcatttgtaattagaggtgatgaagtcagacaaatcgctccagggcaaactggaaagattgctgattataattataaattaccagatgattttacaggctgcgttatagcttggaattctaacaatcttgattctaaggttggtggtaattataattacctgtatagattgtttaggaagtctaatctcaaaccttttgagagagatatttcaactgaaatctatcaggccggtagcacaccttgtaatggtgttgaaggttttaattgttactttcctttacaatcatatggtttccaacccactaatggtgttggttaccaaccatacagagtagtagtactttcttttgaacttctacatgcaccagcaactgtttgtggacctaaaaagtctactaatttggttaaaaacaaatgtgtcaatttcaacttcaatggtttaacaggcacaggtgttcttactgagtctaacaaaaagtttctgcctttccaacaatttggcagagacattgctgacactactgatgctgtccgtgatccacagacacttgagattcttgacattacaccatgttcttttggtggtgtcagtgttataacaccaggaacaaatacttctaaccaggttgctgttctttatcagggtgttaactgcacagaagtccctgttgctattcatgcagatcaacttactcctacttggcgtgtttattctacaggttctaatgtttttcaaacacgtgcaggctgtttaataggggctgaacatgtcaacaactcatatgagtgtgacatacccattggtgcaggtatatgcgctagttatcagactcagactaattctcctcggcgggcacgtagtgtagctagtcaatccatcattgcctacactatgtcacttggtgcagaaaattcagttgcttactctaataactctattgccatacccacaaattttactattagtgttaccacagaaattctaccagtgtctatgaccaagacatcagtagattgtacaatgtacatttgtggtgattcaactgaatgcagcaatcttttgttgcaatatggcagtttttgtacacaattaaaccgtgctttaactggaatagctgttgaacaagacaaaaacacccaagaagtttttgcacaagtcaaacaaatttacaaaacaccaccaattaaagattttggtggttttaatttttcacaaatattaccagatccatcaaaaccaagcaagaggtcatttattgaagatctacttttcaacaaagtgacacttgcagatgctggcttcatcaaacaatatggtgattgccttggtgatattgctgctagagacctcatttgtgcacaaaagtttaacggccttactgttttgccacctttgctcacagatgaaatgattgctcaatacacttctgcactgttagcgggtacaatcacttctggttggacctttggtgcaggtgctgcattacaaataccatttgctatgcaaatggcttataggtttaatggtattggagttacacagaatgttctctatgagaaccaaaaattgattgccaaccaatttaatagtgctattggcaaaattcaagactcactttcttccacagcaagtgcacttggaaaacttcaagatgtggtcaaccaaaatgcacaagctttaaacacgcttgttaaacaacttagctccaattttggtgcaatttcaagtgttttaaatgatatcctttcacgtcttgacaaagttgaggctgaagtgcaaattgataggttgatcacaggcagacttcaaagtttgcagacatatgtgactcaacaattaattagagctgcagaaatcagagcttctgctaatcttgctgctactaaaatgtcagagtgtgtacttggacaatcaaaaagagttgatttttgtggaaagggctatcatcttatgtccttccctcagtcagcacctcatggtgtagtcttcttgcatgtgacttatgtccctgcacaagaaaagaacttcacaactgctcctgccatttgtcatgatggaaaagcacactttcctcgtgaaggtgtctttgtttcaaatggcacacactggtttgtaacacaaaggaatttttatgaaccacaaatcattactacagacaacacatttgtgtctggtaactgtgatgttgtaataggaattgtcaacaacacagtttatgatcctttgcaacctgaattagactcattcaaggaggagttagataaatattttaagaatcatacatcaccagatgttgatttaggtgacatctctggcattaatgcttcagttgtaaacattcaaaaagaaattgaccgcctcaatgaggttgccaagaatttaaatgaatctctcatcgatctccaagaacttggaaagtatgagcagtatataaaatggccatggtacatttggctaggttttatagctggcttgattgccatagtaatggtgacaattatgctttgctgtatgaccagttgctgtagttgtctcaagggctgttgttcttgtggatcctgctgcaaatttgatgaagacnactntgagccagtgctcaaaggagtcaaattacattacacataaacgaacttatggatttgtttatgagaatcttcacaattggaactgtaactttgaagcaaggtgaaatcaaggatgctactccttcagattttgttcgcgctactgcaacgataccgatacaagcctcactccctttcggatggcttattgttggcgttgcacttcttgctgtttttcagagcgcttccaaaatcataaccctcaaaaagagatggcaactagcactctccaagggtgttcactttgtttgcaacttgctgttgttgtttgtaacagtttactcacaccttttgctcgttgctgctggccttgaagccccttttctctatctttatgctttagtctacttcttgcagagtataaactttgtaagaataataatgaggctttggctttgctggaaatgccgttccaaaaacccattactttatgatgccaactattttctttgctggcatactaattgttacgactattgtataccttacaatagtgtaacttcttcaattgtcattacttcaggtgatggcacaacaagtcctatttctgaacatgactaccagattggtggttatactgaaaaatgggaatctggagtaaaagactgtgttgtattacacagttacttcacttcagactattaccagctgtactcaactcaattgagtacagacactggtgttgaacatgttaccttcttcatctacaataaaattgttgatgagcctgaagaacatgtccaaattcacacaatcgacggttcatccggagttgttaatccagtaatggaaccaatttatgatgaaccgacgacgactactagcgtgcctttgtaagcacaagctgatgagtacgaacttatgtactcattcgtttcggaagagacaggtacgttaatagttaatagcgtacttctttttcttgctttcgtggtattcttgctagttacactagccatccttactgcgcttcgattgtgtgcgtactgctgcaatattgttaacgtgagtcttgtaaaaccttctttttacgtttactctcgtgttaaaaatctgaattcttctagagttcctgatcttccggtctaaacgaactaaatattatattagtttttctgtttggaactttaattttagccatggcagattccaacggtactattaccgttgaagagcttaaaaagctccttgaacaatggaacctagtaataggtttcctattccttacatggatttgtcttctacaatttgcctatgccaacaggaataggtttttgtatataattaagttaattttcctctggctgttatggccagtaactttagcttgttttgtgcttgctgctgtttacagaataaattggatcaccggtggaattgctatcgcaatggcttgtcttgtaggcttgatgtggctcagctacttcattgcttctttcagactgtttgcgcgtacgcgttccatgtggtcattcaatccagaaactaacattcttctcaacgtgccactccatggcactattctgaccagaccgcttctagaaagtgaactcgtaatcggagctgtgatccttcgtggacatcttcgtattgctggacaccatctaggacgctgtgacatcaaggacctgcctaaagaaatcactgttgctacatcacgaacgctttcttattacaaattgggagcttcgcagcgtgtagcaggtgactcaggttttgctgcatacagtcgctacaggattggcaactataaattaaacacagaccattccagtagcagtgacaatattgctttgcttgtacagtaagtgacaacagatgtttcatctcgttgactttcaggttactatagcagagatattactaattattatgaggacttttaaagtttccatttggaatcttgattacatcataaacctcataattaaaaatttatctaagtcactaactgagaataaatattctcaattagatgaagagcaaccaatggagattgattaaacgaacatgaaaattattcttttcttggcactgataacactcgctacttgtgagctttatcactaccaagagtgtgttagaggtacaacagtacttttaaaagaaccttgctcttctggaacatacgagggcaattcaccatttcatcctctagctgataacaaatttgcactgacttgctttagcactcaatttgcttttgcttgtcctgacggcgtaaaacacgtctatcagttacgtgccagatcagtttcacctaaactgttcatcagacaagaggaagttcaagaactttactctccaatttttcttattgttgcggcaatagtgtttataacactttgcttcacactcaaaagaaagacagaatgattgaactttcattaattgacttctatttgtgctttttagcctttctgctattccttgttttaattatgcttattatcttttggttctcacttgaactgcaagatcataatgaaacttgtcacgcctaaacgaacatgaaatttcttgttttcttaggaatcatcacaactgtagctgcatttcaccaagaatgtagtttacagtcatgtactcaacatcaaccatatgtagttgatgacccgtgtcctattcacttctattctaaatggtatattagagtaggagctagaaaatcagcacctttaattgaattgtgcgtggatgaggctggttctaaatcacccattcagtacatcgatatcggtaattatacagtttcctgtttaccttttacaattaattgccaggaacctaaattgggtagtcttgtagtgcgttgttcgttctatgaagactttttagagtatcatgacgttcgtgttgttttagatttcatctaaacgaacaaactaaaatgtctgataatggaccccaaaatcagcgaaatgcaccccgcattacgtttggtggaccctcagattcaactggcagtaaccagaatggagaacgcagtggggcgcgatcaaaacaacgtcggccccaaggtttacccaataatactgcgtcttggttcaccgctctcactcaacatggcaaggaagaccttaaattccctcgaggacaaggcgttccaattaacaccaatagcagtccagatgaccaaattggctactaccgaagagctaccagacgaattcgtggtggtgacggtaaaatgaaagatctcagtccaagatggtatttctactacctaggaactgggccagaagctggacttccctatggtgctaacaaagacggcatcatatgggttgcaactgagggagccttgaatacaccaaaagatcacattggcacccgcaatcctgctaacaatgctgcaatcgtgctacaacttcctcaaggaacaacattgccaaaaggcttctacgcagaagggagcagaggcggcagtcaagcctcttctcgttcctcatcacgtagtcgcaacagttcaagaaattcaactccaggcagcagtaggggaacttctcctgctagaatggctggcaatggcggtgatgctgctcttgctttgctgctgcttgacagattgaaccagcttgagagcaaaatgtctggtaaaggccaacaacaacaaggccaaactgtcactaagaaatctgctgctgaggcttctaagaagcctcggcaaaaacgtactgccactaaagcatacaatgtaacacaagctttcggcagacgtggtccagaacaaacccaaggaaattttggggaccaggaactaatcagacaaggaactgattacaaacattggccgcaaattgcacaatttgcccccagcgcttcagcgttcttcggaatgtcgcgcattggcatggaagtcacaccttcgggaacgtggttgacctacacaggtgccatcaaattggatgacaaagatccaaatttcaaagatcaagtcattttgctgaataagcatattgacgcatacaaaacattcccaccaacagagcctaaaaaggacaaaaagaagaaggctgatgaaactcaagccttaccgcagagacagaagaaacagcaaactgtgactcttcttcctgctgcagatttggatgatttctccaaacaattgcaacaatccatgagcagtgctgactcaactcaggcctaaactcatgcagaccacacaaggcagatgggctatataaacgttttcgcttttccgtttacgatatatagtctactcttgtgcagaatgaattctcgtaactacatagcacaagtagatgtagttaactttaatctcacatagcaatctttaatcagtgtgtaacattagggaggacttgaaagagccaccacattttcaccgaggccacgcggagtacgatcgagtgtacagtgaacaatgctagggagagctgcctatatggaagagccctaatgtgtaaaattaattttagtagtgctatccccatgtg

SEQ ID NO: 53 - DNA, 29809 bp, synthetic construct
  misc_feature 1..29809: note = Reconstituted virus 16
  source 1..29809: mol_type = other DNA
accaactttcgatctcttgtagatctgttctctaaacgaactttaaaatctgtgtggctgtcactcggctgcatgcttagtgcactcacgcagtataattaataactaattactgtcgttgacaggacacgagtaactcgtctatcttctgcaggctgcttacggtttcgtccgtgttgcagccgatcatcagcacatctaggttttgtccgggtgtgaccgaaaggtaagatggagagccttgtccctggtttcaacgagaaaacacacgtccaactcagtttgcctgttttacaggttcgcgacgtgctcgtacgtggctttggagactccgtggaggaggtcttatcagaggcacgtcaacatcttaaagatggcacttgtggcttagtagaagttgaaaaaggcgttttgcctcaacttgaacagccctatgtgttcatcaaacgttcggatgctcgaactgcacctcatggtcatgttatggttgagctggtagcagaactcgaaggcattcagtacggtcgtagtggtgagacacttggtgtccttgtccctcatgtgggcgaaataccagtggcttaccgcaaggttcttcttcgtaagaacggtaataaaggagctggtggccatagttacggcgccgatctaaagtcatttgacttaggcgacgagcttggcactgatccttatgaagattttcaagaaaactggaacactaaacatagcagtggtgttacccgtgaactcatgcgtgagcttaacggaggggcatacactcgctatgtcgataacaacttctgtggccctgatggctaccctcttgagtgcattaaagaccttctagcacgtgctggtaaagcttcatgcactttgtccgaacaactggactttattgacactaagaggggtgtatactgctgccgtgaacatgagcatgaaattgcttggtacacggaacgttctgaaaagagctatgaattgcagacaccttttgaaattaaattggcaaagaaatttgacaccttcaatggggaatgtccaaattttgtatttcccttaaattccataatcaagactattcaaccaagggttgaaaagaaaaagcttgatggctttatgggtagaattcgatctgtctatccagttgcgtcaccaaatgaatgcaaccaaatgtgcctttcaactctcatgaagtgtgatcattgtggtgaaacttcatggcagacgggcgattttgttaaagccacttgcgaattttgtggcactgagaatttgactaaagaaggtgccactacttgtggttacttaccccaaaatgctgttgttaaaatttattgtccagcatgtcacaattcagaagtaggacctgagcatagtcttgccgaataccataatgaatctggcttgaaaaccattcttcgtaagggtggtcgcactattgcctttggaggctgtgtgttctcttatgttggttgccataacaagtgtgcctattgggttccacgtgctagcgctaacataggttgtaaccatacaggtgttgttggagaaggttccgaaggtcttaatgacaaccttcttgaaatactccaaaaagagaaagtcaacatcaatattgttggtgactttaaacttaatgaagagatcgccattattttggcatctttttctgcttccacaagtgcttttgtggaaactgtgaaaggtttggattataaagcattcaaacaaattgttgaatcctgtggtaattttaaagttacaaaaggaaaagctaaaaaaggtgcctggaatattggtgaacagaaatcaatactgagtcctctttatgcatttgcatcagaggctgctcgtgttgtacgatcaattttctcccgcactcttgaaactgctcaaaattctgtgcgtgttttacagaaggccgctataacaatactagatggaatttcacagtattcactgagactcattgatgctatgatgttcacatctgatttggctactaacaatctagttgtaatggcctacattacaggtggtgttgttcagttgacttcgcagtggctaactaacatctttggcactgtttatgaaaaactcaaacccgtccttgattggcttgaagagaagtttaaggaaggtgtagagtttcttagagacggttgggaaattgttaaatttatctcaacctgtgcttgtgaaattgtcggtggacaaattgtcacctgtgcaaaggaaattaaggagagtgttcagacattctttaagcttgtaaataaatttttggctttgtgtgctgactctatcattattggtggagctaaacttaaagccttgaatttaggtgaaacatttgtcacgcactcaaagggattgtacagaaagtgtgttaaatccagagaagaaactggcctactcatgcctctaaaagccccaaaagaaattatcttcttagagggagaaacacttcccacagaagtgttaacagaggaagttgtcttgaaaactggtgatttacaaccattagaacaacctactagtgaagctgttgaagctccattggttggtacaccagtttgtattaacgggcttatgttgctcgaaatcaaagacacagaaaagtactgtgcccttgcacctaatatgatggtaacaaacaataccttcacactcaaaggcggtgcaccaacaaaggttacttttggtgatgacactgtgatagaagtgcaaggttacaagagtgtgaatatcacttttgaacttgatgaaaggattgataaagtacttaatgagaagtgctctgcctatacagttgaactcggtacagaagtaaatgagttcgcctgtgttgtggcagatgctgtcataaaaactttgcaaccagtatctgaattacttacaccactgggcattgatttagatgagtggagtatggctacatactacttatttgatgagtctggtgagtttaaattggcttcacatatgtattgttctttttaccctccagatgaggatgaagaagaaggtgattgtgaagaagaagagtttgagccatcaactcaatatgagtatggtactgaagatgattaccaaggtaaacctttggaatttggtgccacttctgctgctcttcaacctgaagaagagcaagaagaagattggttagatgatgatagtcaacaaactgttggtcaacaagacggcagtgaggacaatcagacaactactattcaaacaattgttgaggttcaacctcaattagagatggaacttacaccagttgttcagactattgaagtgaatagttttagtggttatttaaaacttactgacaatgtatacattaaaaatgcagacattgtggaagaagctaaaaaggtaaaaccaacagtggttgttaatgcagccaatgtttaccttaaacatggaggaggtgttgcaggagccttaaataaggctactaacaatgccatgcaagttgaatctgatgattacatagctactaatggaccacttaaagtgggtggtagttgtgttttaagcggacacaatcttgctaaacactgtcttcatgttgtcggcccaaatgttaacaaaggtgaagacattcaacttcttaagagtgcttatgaaaattttaatcagcacgaagttctacttgcaccattattatcagctggtatttttggtgctgaccctatacattctttaagagtttgtgtagatactgttcgcacaaatgtctacttagctgtctttgataaaaatctctatgacaaacttgtttcaagctttttggaaatgaagagtgaaaagcaagttgaacaaaagatcgctgagattcctaaagaggaagttaagccatttataactgaaagtaaaccttcagttgaacagagaaaacaagatgataagaaaatcaaagcttgtgttgaagaagttacaacaactctggaagaaactaagttcctcacagaaaacttgttactttatattgacattaatggcaatcttcatccagattctgccactcttgttagtgacattgacatcactttcttaaagaaagatgctccatatatagtgggtgatgttgttcaagagggtgttttaactgctgtggttatacctactaaaaaggctggtggcactactgaaatgctagcgaaagctttgagaaaagtgccaacagacaattatataaccacttacccgggtcagggtttaaatggttacactgtagaggaggcaaagacagtgcttaaaaagtgtaaaagtgccttttacattctaccatctattatctctaatgagaagcaagaaattcttggaactgtttcttggaatttgcgagaaatgcttgcacatgcagaagaaacacgcaaattaatgcctgtctgtgtggaaactaaagccatagtttcaactatacagcgtaaatataagggtattaaaatacaagagggtgtggttgattatggtgctagattttacttttacaccagtaaaacaactgtagcgtcacttatcaacacacttaacgatctaaatgaaactcttgttacaatgccacttggctatgtaacacatggcttaaatttggaagaagctgctcggtatatgagatctctcaaagtgccagctacagtttctgtttcttcacctgatgctgttacagcgtataatggttatcttacttcttcttctaaaacacctgaagaacattttattgaaaccatctcacttgctggttcctataaagattggtcctattctggacaatctacacaactaggtatagaatttcttaagagaggtgataaaagtgtatattacactagtaatcctaccacattccacctagatggtgaagttatcacctttgacaatcttaagacacttctttctttgagagaagtgaggactattaaggtgtttacaacagtagacaacattaacctccacacgcaagttgtggacatgtcaatgacatatggacaacagtttggtccaacttatttggatggagctgatgttactaaaataaaacctcataattcacatgaaggtaaaacattttatgttttacctaatgatgacactctacgtgttgaggcttttgagtactaccacacaactgatcctagttttctgggtaggtacatgtcagcattaaatcacactaaaaagtggaaatacccacaagttaatggtttaacttctattaaatgggcagataacaactgttatcttgccactgcattgttaacactccaacaaatagagttgaagtttaatccacctgctctacaagatgcttattacagagcaagggctggtgaagctgctaacttttgtgcacttatcttagcctactgtaataagacagtaggtgagttaggtgatgttagagaaacaatgagttacttgtttcaacatgccaatttagattcttgcaaaagagtcttgaacgtggtgtgtaaaacttgtggacaacagcagacaacccttaagggtgtagaagctgttatgtacatgggcacactttcttatgaacaatttaagaaaggtgttcagataccttgtacgtgtggtaaacaagctacaaaatatctagtacaacaggagtcaccttttgttatgatgtcagcaccacctgctcagtatgaacttaagcatggtacatttacttgtgctagtgagtacactggtaattaccagtgtggtcactataaacatataacttctaaagaaactttgtattgcatagacggtgctttacttacaaagtcctcagaatacaaaggtcctattacggatgttttctacaaagaaaacagttacacaacaaccataaaaccagttacttataaattggatggtgttgtttgtacagaaattgaccctaagttggacaattattataagaaagacaattcttatttcacagagcaaccaattgatcttgtaccaaaccaaccatatccaaacgcaagcttcgataattttaagtttgtatgtgataatatcaaatttgctgatgatttaaaccagttaactggttataagaaacctgcttcaagagagcttaaagttacatttttccctgacttaaatggtgatgtggtggctattgattataaacactacacaccctcttttaagaaaggagctaaattgttacataaacctattgtttggcatgttaacaatgcaactaataaagccacgtataaaccaaatacctggtgtatacgttgtctttggagcacaaaaccagttgaaacatcaaattcgtttgatgtactgaagtcagaggacgcgcagggaatggataatcttgcctgcgaagatctaaaaccagtctctgaagaagtagtggaaaatcctaccatacagaaagacgttcttgagtgtaatgtgaaaactaccgaagttgtaggagacattatacttaaaccagcaaataatagtttaaaaattacagaagaggttggccacacagatctaatggctgcttatgtagacaattctagtcttactattaagaaacctaatgaattatctagagtattaggtttgaaaacccttgctactcatggtttagctgctgttaatagtgtcccttgggatactatagctaattatgctaagccttttcttaacaaagttgttagtacaactactaacatagttacacggtgtttaaaccgtgtttgtactaattatatgccttatttctttactttattgctacaattgtgtacttttactagaagtacaaattctagaattaaagcatctatgccgactactatagcaaagaatactgttaagagtgtcggtaaattttgtctagaggcttcatttaattatttgaagtcacctaatttttctaaactgataaatattataatttggtttttactattaagtgtttgcctaggttctttaatctactcaaccgctgctttaggtgttttaatgtctaatttaggcatgccttcttactgtactggttacagagaaggctatttgaactctactaatgtcactattgcaacctactgtactggttctataccttgtagtgtttgtcttagtggtttagattctttagacacctatccttctttagaaactatacaaattaccatttcatcttttaaatgggatttaactgcttttggcttagttgcagagtggtttttggcatatattcttttcactaggtttttctatgtacttggattggctgcaatcatgcaattgtttttcagctattttgcagtacattttattagtaattcttggcttatgtggttaataattaatcttgtacaaatggccccgatttcagctatggttagaatgtacatcttctttgcatcattttattatgtatggaaaagttatgtgcatgttgtagacggttgtaattcatcaacttgtatgatgtgttacaaacgtaatagagcaacaagagtcgaatgtacaactattgttaatggtgttagaaggtccttttatgtctatgctaatggaggtaaaggcttttgcaaactacacaattggaattgtgttaattgtgatacattctgtgctggtagtacatttattagtgatgaagttgcgagagacttgtcactacagtttaaaagaccaataaatcctactgaccagtcttcttacatcgttgatagtgttacagtgaagaatggttccatccatctttactttgataaagctggtcaaaagacttatgaaagacattctctctctcattttgttaacttagacaacctgagagctaataacactaaaggttcattgcctattaatgttatagtttttgatggtaaatcaaaatgtgaagaatcatctgcaaaatcagcgtctgtttactacagtcagcttatgtgtcaacctatactgttactagatcaggcattagtgtctgatgttggtgatagtgcggaagttgcagttaaaatgtttgatgcttacgttaatacgttttcatcaacttttaacgtaccaatggaaaaactcaaaacactagttgcaactgcagaagctgaacttgcaaagaatgtgtccttagacaatgtcttatctacttttatttcagcagctcggcaagggtttgttgattcagatgtagaaactaaagatgttgttgaatgtcttaaattgtcacatcaatctgacatagaagttactggcgatagttgtaataactatatgctcacctataacaaagttgaaaacatgacaccccgtgaccttggtgcttgtattgactgtagtgcgcgtcatattaatgcgcaggtagcaaaaagtcacaacattgctttgatatggaacgttaaagatttcatgtcattgtctgaacaactacgaaaacaaatacgtagtgctgctaaaaagaataacttaccttttaagttgacatgtgcaactactagacaagttgttaatgttgtaacaacaaagatagcacttaagggtggtaaaattgttaataattggttgaagcagttaattaaagttacacttgtgttcctttttgttgctgctattttctatttaataacacctgttcatgtcatgtctaaacatactgacttttcaagtgaaatcataggatacaaggctattgatggtggtgtcactcgtgacatagcatctacagatacttgttttgctaacaaacatgctgattttgacacatggtttagccagcgtggtggtagttatactaatgacaaagcttgcccattgattgctgcagtcataacaagagaagtgggttttgtcgtgcctggtttgcctggcacgatattacgcacaactaatggtgactttttgcatttcttacctagagtttttagtgcagttggtaacatctgttacacaccatcaaaacttatagagtacactgactttgcaacatcagcttgtgttttggctgctgaatgtacaatttttaaagatgcttctggtaagccagtaccatattgttatgataccaatgtactagaaggttctgttgcttatgaaagtttacgccctgacacacgttatgtgctcatggatggctctattattcaatttcctaacacctaccttgaaggttctgttagagtggtaacaacttttgattctgagtactgtaggcacggcacttgtgaaagatcagaagctggtgtttgtgtatctactagtggtagatgggtacttaacaatgattattacagatctttaccaggagttttctgtggtgtagatgctgtaaatttacttactaatatgtttacaccactaattcaacctattggtgctttggacatatcagcatctatagtagctggtggtattgtagctatcgtagtaacatgccttgcctactattttatgaggtttagaagagcttttggtgaatacagtcatgtagttgcctttaatactttactattccttatgtcattcactgtactctgtttaacaccagtttactcattcttacctggtgtttattctgttatttacttgtacttgacattttatcttactaatgatgtttcttttttagcacatattcagtggatggttatgttcacacctttagtacctttctggataacaattgcttatatcatttgtatttccacaaagcatttctattggttctttagtaattacctaaagagacgtgtagtctttaatggtgtttcctttagtacttttgaagaagctgcgctgtgcacctttttgttaaataaagaaatgtatctaaagttgcgtagtgatgtgctattacctcttacgcaatataatagatacttagctctttataataagtacaagtattttagtggagcaatggatacaactagctacagagaagctgcttgttgtcatctcgcaaaggctctcaatgacttcagtaactcaggttctgatgttctttaccaaccaccacaaacctctatcacctcagctgttttgcagagtggttttagaaaaatggcattcccatctggtaaagttgagggttgtatggtacaagtaacttgtggtacaactacacttaacggtctttggcttgatgacgtagtttactgtccaagacatgtgatctgcacctctgaagacatgcttaaccctaattatgaagatttactcattcgtaagtctaatcataatttcttggtacaggctggtaatgttcaactcagggttattggacattctatgcaaaattgtgtacttaagcttaaggttgatacagccaatcctaagacacctaagtataagtttgttcgcattcaaccaggacagactttttcagtgttagcttgttacaatggttcaccatctggtgtttaccaatgtgctatgaggcccaatttcactattaagggttcattccttaatggttcatgtggtagtgttggttttaacatagattatgactgtgtctctttttgttacatgcaccatatggaattaccaactggagttcatgctggcacagacttagaaggtaacttttatggaccttttgttgacaggcaaacagcacaagcagctggtacggacacaactattacagttaatgttttagcttggttgtacgctgctgttataaatggagacaggtggtttctcaatcgatttaccacaactcttaatgactttaaccttgtggctatgaagtacaattatgaacctctaacacaagaccatgttgacatactaggacctctttctgctcaaactggaattgccgttttagatatgtgtgcttcattaaaagaattactgcaaaatggtatgaatggacgtaccatattgggtagtgctttattagaagatgaatttacaccttttgatgttgttagacaatgctcaggtgttactttccaaagtgcagtgaaaagaacaatcaagggtacacaccactggttgttactcacaattttgacttcacttttagttttagtccagagtactcaatggtctttgttcttttttttgtatgaaaatgcctttttaccttttgctatgggtattattgctatgtctgcttttgcaatgatgtttgtcaaacataagcatgcatttctctgtttgtttttgttaccttctcttgccactgtagcttattttaatatggtctatatgcctgctagttgggtgatgcgtattatgacatggttggatatggttgatactagtttgtctggttttaagctaaaagactgtgttatgtatgcatcagctgtagtgttactaatccttatgacagcaagaactgtgtatgatgatggtgctaggagagtgtggacacttatgaatgtcttgacactcgtttataaagtttattatggtaatgctttagatcaagccatttccatgtgggctcttataatctctgttacttctaactactcaggtgtagttacaactgtcatgtttttggccagaggtattgtttttatgtgtgttgagtattgccctattttcttcataactggtaatacacttcagtgtataatgctagtttattgtttcttaggctatttttgtacttgttactttggcctcttttgtttactcaaccgctactttagactgactcttggtgtttatgattacttagtttctacacaggagtttagatatatgaattcacagggactactcccacccaagaatagcatagatgccttcaaactcaacattaaattgttgggtgttggtggcaaaccttgtatcaaagtagccactgtacagtctaaaatgtcagatgtaaagtgcacatcagtagtcttactctcagttttgcaacaactcagagtagaatcatcatctaaattgtgggctcaatgtgtccagttacacaatgacattctcttagctaaagatactactgaagcctttgaaaaaatggtttcactactttctgttttgctttccatgcagggtgctgtagacataaacaagctttgtgaagaaatgctggacaacagggcaaccttacaagctatagcctcagagtttagttcccttccatcatatgcagcttttgctactgctcaagaagcttatgagcaggctgttgctaatggtgattctgaagttgttcttaaaaagttgaagaagtctttgaatgtggctaaatctgaatttgaccgtgatgcagccatgcaacgtaagttggaaaagatggctgatcaagctatgacccaaatgtataaacaggctagatctgaggacaagagggcaaaagttactagtgctatgcagacaatgcttttcactatgcttagaaagttggataatgatgcactcaacaacattatcaacaatgcaagagatggttgtgttcccttgaacataatacctcttacaacagcagccaaactaatggttgtcataccagactataacacatataaaaatacgtgtgatggtacaacatttacttatgcatcagcattgtgggaaatccaacaggttgtagatgcagatagtaaaattgttcaacttagtgaaattagtatggacaattcacctaatttagcatggcctcttattgtaacagctttaagggccaattctgctgtcaaattacagaataatgagcttagtcctgttgcactacgacagatgtcttgtgctgccggtactacacaaactgcttgcactgatgacaatgcgttagcttactacaacacaacaaagggaggtaggtttgtacttgcactgttatccgatttacaggatttgaaatgggctagattccctaagagtgatggaactggtactatctatacagaactggaaccaccttgtaggtttgttacagacacacctaaaggtcctaaagtgaagtatttatactttattaaaggattaaacaacctaaatagaggtatggtacttggtagtttagctgccacagtacgtctacaagctggtaatgcaacagaagtgcctgccaattcaactgtattatctttctgtgcttttgctgtagatgctgctaaagcttacaaagattatctagctagtgggggacaaccaatcactaattgtgttaagatgttgtgtacacacactggtactggtcaggcaataacagttacaccggaagccaatatggatcaagaatcctttggtggtgcatcgtgttgtctgtactgccgttgccacatagatcatccaaatcctaaaggattttgtgacttaaaaggtaagtatgtacaaatacctacaacttgtgctaatgaccctgtgggttttacacttaaaaacacagtctgtaccgtctgcggtatgtggaaaggttatggctgtagttgtgatcaactccgcgaacccatgcttcagtcagctgatgcacaatcgtttttaaacgggtttgcggtgtaagtgcagcccgtcttacaccgtgcggcacaggcactagtactgatgtcgtatacagggcttttgacatctacaatgataaagtagctggttttgctaaattcctaaaaactaattgttgtcgcttccaagaaaaggacgaagatgacaatttaattgattcttactttgtagttaagagacacactttctctaactaccaacatgaagaaacaatttataatttacttaaggattgtccagctgttgctaaacatgacttctttaagtttagaatagacggtgacatggtaccacatatatcacgtcaacgtcttactaaatacacaatggcagacctcgtctatgctttaaggcattttgatgaaggtaattgtgacacattaaaagaaatacttgtcacatacaattgttgtgatgatgattatttcaataaaaaggactggtatgattttgtagaaaacccagatatattacgcgtatacgccaacttaggtgaacgtgtacgccaagctttgttaaaaacagtacaattctgtgatgccatgcgaaatgctggtattgttggtgtactgacattagataatcaagatctcaatggtaactggtatgatttcggtgatttcatacaaaccacgccaggtagtggagttcctgttgtagattcttattattcattgttaatgcctatattaaccttgaccagggctttaactgcagagtcacatgttgacactgacttaacaaagccttacattaagtgggatttgttaaaatatgacttcacggaagagaggttaaaactctttgaccgttattttaaatattgggatcagacataccacccaaattgtgttaactgtttggatgacagatgcattctgcattgtgcaaactttaatgttttattctctacagtgttcccacttacaagttttggaccactagtgagaaaaatatttgttgatggtgttccatttgtagtttcaactggataccacttcagagagctaggtgttgtacataatcaggatgtaaatttacatagctctagacttagttttaaggaattacttgtgtatgctgctgaccctgctatgcacgctgcttctggtaatctattactagataaacgcactacgtgcttttcagtagctgcacttactaacaatgttgcttttcaaactgtcaaacccggtaattttaacaaagacttctatgactttgctgtgtctaagggtttctttaaggaaggaagttctgttgaattaaaacacttcttctttgctcaggatggtaatgctgctatcagcgattatgactactatcgttataatctaccaacaatgtgtgatatcagacaactactatttgtagttgaagttgttgataagtactttgattgttacgatggtggctgtattaatgctaaccaagtcatcgtcaacaacctagacaaatcagctggttttccatttaataaatggggtaaggctagactttattatgattcaatgagttatgaggatcaagatgcacttttcgcatatacaaaacgtaatgtcatccctactataactcaaatgaatcttaagtatgccattagtgcaaagaatagagctcgcaccgtagctggtgtctctatctgtagtactatgaccaatagacagtttcatcaaaaattattgaaatcaatagccgccactagaggagctactgtagtaattggaacaagcaaattctatggtggttggcacaacatgttaaaaactgtttatagtgatgtagaaaaccctcaccttatgggttgggattatcctaaatgtgatagagccatgcctaacatgcttagaattatggcctcacttgttcttgctcgcaaacatacaacgtgttgtagcttgtcacaccgtttctatagattagctaatgagtgtgctcaagtattgagtgaaatggtcatgtgtggcggttcactatatgttaaaccaggtggaacctcatcaggagatgccacaactgcttatgctaatagtgtttttaacatttgtcaagctgtcacggccaatgttaatgcacttttatctactgatggtaacaaaattgccgataagtatgtccgcaatttacaacacagactttatgagtgtctctatagaaatagagatgttgacacagactttgtgaatgagttttacgcatatttgcgtaaacatttctcaatgatgatactctctgacgatgctgttgtgtgtttcaatagcacttatgcatctcaaggtctagtggctagcataaagaactttaagtcagttctttattatcaaaacaatgtttttatgtctgaagcaaaatgttggactgagactgaccttactaaaggacctcatgaattttgctctcaacatacaatgctagttaaacagggtgatgattatgtgtaccttccttacccagatccatcaagaatcctaggggccggctgttttgtagatgatatcgtaaaaacagatggtacacttatgattgaacggttcgtgtctttagctatagatgcttacccacttactaaacatcctaatcaggagtatgctgatgtctttcatttgtacttacaatacataagaaagctacatgatgagttaacaggacacatgttagacatgtattctgttatgcttactaatgataacacttcaaggtattgggaacctgagttttatgaggctatgtacacaccgcatacagtcttacaggctgttggggcttgtgttctttgcaattcacagacttcattaagatgtggtgcttgcatacgtagaccattcttatgttgtaaatgctgttacgaccatgtcatatcaacatcacataaattagtcttgtctgttaatccgtatgtttgcaatgctccaggttgtgatgtcacagatgtgactcaactttacttaggaggtatgagctattattgtaaatcacataaaccacccattagttttccattgtgtgctaatggacaagtttttggtttatataaaaatacatgtgttggtagcgataatgttactgactttaatgcaattgcaacatgtgactggacaaatgctggtgattacattttagctaacacctgtactgaaagactcaagctttttgcagcagaaacgctcaaagctactgaggagacatttaaactgtcttatggtattgctactgtacgtgaagtgctgtctgacagagaattacatctttcatgggaagttggtaaacctagaccaccacttaaccgaaattatgtctttactggttatcgtgtaactaaaaacagtaaagtacaaataggagagtacacctttgaaaaaggtgactatggtgatgctgttgtttaccgaggtacaacaacttacaaattaaatgttggtgattattttgtgctgacatcacatacagtaatgccattaagtgcacctacactagtgccacaagagcactatgttagaattactggcttatacccaacactcaatatctcagatgagttttctagcaatgttgcaaattatcaaaaggttggtatgcaaaagtattctacactccagggaccacctggtactggtaagagtcattttgctattggcctagctctctactacccttctgctcgcatagtgtatacagcttgctctcatgccgctgttgatgcactatgtgagaaggcattaaaatatttgcctatagataaatgtagtagaattatacctgcacgtgctcgtgtagagtgttttgataaattcaaagtgaattcaacattagaacagtatgtcttttgtactgtaaatgcattgcctgagacgacagcagatatagttgtctttgatgaaatttcaatggccacaaattatgatttgagtgttgtcaatgccagattacgtgctaagcactatgtgtacattggcgaccctgctcaattacctgcaccacgcacattgctaactaagggcacactagaaccagaatatttcaattcagtgtgtagacttatgaaaactataggtccagacatgttcctcggaacttgtcggcgttgtcctgctgaaattgttgacactgtgagtgctttggtttatgataataagcttaaagcacataaagacaaatcagctcaatgctttaaaatgttttataagggtgttatcacgcatgatgtttcatctgcaattaacaggccacaaataggcgtggtaagagaattccttacacgtaaccctgcttggagaaaagctgtctttatttcaccttataattcacagaatgctgtagcctcaaagattttgggactaccaactcaaactgttgattcatcacagggctcagaatatgactatgtcatattcactcaaaccactgaaacagctcactcttgtaatgtaaacagatttaatgttgctattaccagagcaaaagtaggcatactttgcataatgtctgatagagacctttatgacaagttgcaatttacaagtcttgaaattccacgtaggaatgtggcaactttacaagctgaaaatgtaacaggactctttaaagattgtagtaaggtaatcactgggttacatcctacacaggcacctacacacctcagtgttgacactaaattcaaaactgaaggtttatgtgttgacatacctggcatacctaaggacatgacctatagaagactcatctctatgatgggttttaaaatgaattatcaagttaatggttaccctaacatgtttatcacccgcgaagaagctataagacatgtacgtgcatggattggcttcgatgtcgaggggtgtcatgctactagagaagctgttggtaccaatttacctttacagctaggtttttctacaggtgttaacctagttgctgtacctacaggttatgttgatacacctaataatacagatttttccagagttagtgctaaaccaccgcctggagatcaatttaaacacctcataccacttatgtacaaaggacttccttggaatgtagtgcgtataaagattgtacaaatgttaagtgacacacttaaaaatctctctgacagagtcgtatttgtcttatgggcacatggctttgagttgacatctatgaagtattttgtgaaaataggacctgagcgcacctgttgtctatgtgatagacgtgccacatgcttttccactgcttcagacacttatgcctgttggcatcattctattggatttgattacgtctataatccgtttatgattgatgttcaacaatggggttttacaggtaacctacaaagcaaccatgatctgtattgtcaagtccatggtaatgcacatgtagctagttgtgatgcaatcatgactaggtgtctagctgtccacgagtgctttgttaagcgtgttgactggactattgaatatcctataattggtgatgaactgaagattaatgcggcttgtagaaaggttcaacacatggttgttaaagctgcattattagcagacaaattcccagttcttcacgacattggtaaccctaaagctattaagtgtgtacctcaagctgatgtagaatggaagttctatgatgcacagccttgtagtgacaaagcttataaaatagaagaattattctattcttatgccacacattctgacaaattcacagatggtgtatgcctattttggaattgcaatgtcgatagatatcctgctaattccattgtttgtagatttgacactagagtgctatctaaccttaacttgcctggttgtgatggtggcagtttgtatgtaaataaacatgcattccacacaccagcttttgataaaagtgcttttgttaatttaaaacaattaccatttttctattactctgacagtccatgtgagtctcatggaaaacaagtagtgtcagatatagattatgtaccactaaagtctgctacgtgtataacacgttgcaatttaggtggtgctgtctgtagacatcatgctaatgagtacagattgtatctcgatgcttataacatgatgatctcagctggctttagcttgtgggtttacaaacaatttgatacttataacctctggaacacttttacaagacttcagagtttagaaaatgtggcttttaatgttgtaaataagggacactttgatggacaacagggtgaagtaccagtttctatcattaataacactgtttacacaaaagttgatggtgttgatgtagaattgtttgaaaataaaacaacattacctgttaatgtagcatttgagctttgggctaagcgcaacattaaaccagtaccagaggtgaaaatactcaataatttgggtgtggacattgctgctaatactgtgatctgggactacaaaagagatgctccagcacatatatctactattggtgtttgttctatgactgacatagccaagaaaccaactgaaacgatttgtgcaccactcactgtcttttttgatggtagagttgatggtcaagtagacttatttagaaatgcccgtaatggtgttcttattacagaaggtagtgttaaaggtttacaaccatctgtaggtcccaaacaagctagtcttaatggagtcacattaattggagaagccgtaaaaacacagttcaattattataagaaagttgatggtgttgtccaacaattacctgaaacttactttactcagagtagaaatttacaagaatttaaacccaggagtcaaatggaaattgatttcttagaattagctatggatgaattcattgaacggtataaattagaaggctatgccttcgaacatatcgtttatggagattttagtcatagtcagttaggtggtttacatctactgattggactagctaaacgttttaaggaatcaccttttgaattagaagattttattcctatggacagtacagttaaaaactatttcataacagatgcgcaaacaggttcatctaagtgtgtgtgttctgttattgatttattacttgatgattttgttgaaataataaaatcccaagatttatctgtagtttctaaggttgtcaaagtgactattgactatacagaaatttcatttatgctttggtgtaaagatggccatgtagaaacattttacccaaaattacaatctagtcaagcgtggcaaccgggtgttgctatgcctaatctttacaaaatgcaaagaatgctattagaaaagtgtgaccttcaaaattatggtgatagtgcaacattacctaaaggcataatgatgaatgtcgcaaaatatactcaactgtgtcaatatttaaacacattaacattagctgtaccctataatatgagagttatacattttggtgctggttctgataaaggagttgcaccaggtacagctgttttaagacagtggttgcctacgggtacgctgcttgtcgactcagatcttaatgactttgtctctgatgcagattcaactttgattggtgattgtgcaactgtacatacagctaataaatgggatctcattattagtgatatgtacgaccctaagactaaaaatgttacaaaagaaaatgactctaaagagggttttttcacttacatttgtgggtttatacaacaaaagctagctcttggaggttccgtggctataaagataacagaacattcttggaatgctgatctttataagctcatgggacacttcgcatggtggacagcctttgttactaatgtgaatgcgtcatcatctgaagcatttttaattggatgtaattatcttggcaaaccacgcgaacaaatagatggttatgtcatgcatgcaaattacatattttggaggaatacaaatccaattcagttgtcttcctattctttatttgacatgagtaaatttccccttaaattaaggggtactgctgttatgtctttaaaagaaggtcaaatcaatgatatgattttatctcttcttagtaaaggtagacttataattagagaaaacaacagagttgttatttctagtgatgttcttgttaacaactaaacgaacaatgtttgtttttcttgttttattgccactagtctctagtcagtgtgttaatcttacaaccagaactcaattaccccctgcatacactaattctttcacacgtggtgtttattaccctgacaaagttttcagatcctcagttttacattcaactcaggacttgttcttacctttcttttccaatgttacttggttccatgctatacatgtctctgggaccaatggtactaagaggtttgataaccctgtcctaccatttaatgatggtgtttattttgcttccactgagaagtctaacataataagaggctggatttttggtactactttagattcgaagacccagtccctacttattgttaataacgctactaatgttgttattaaagtctgtgaatttcaattttgtaatgatccatttttgggtgtttattaccacaaaaacaacaaaagttggatggaaagtgagttcagagtttattctagtgcgaataattgcacttttgaatatgtctctcagccttttcttatggaccttgaaggaaaacagggtaatttcaaaaatcttagggaatttgtgtttaagaatattgatggttattttaaaatatattctaagcacacgcctattaatttagtgcgtgatctccctcagggtttttcggctttagaaccattggtagatttgccaataggtattaacatcactaggtttcaaactttacttgctttacatagaagttatttgactcctggtgattcttcttcaggttggacagctggtgctgcagcttattatgtgggttatcttcaacctaggacttttctattaaaatataatgaaaatggaaccattacagatgctgtagactgtgcacttgaccctctctcagaaacaaagtgtacgttgaaatccttcactgtagaaaaaggaatctatcaaacttctaactttagagtccaaccaacagaatctattgttagatttcctaatattacaaacttgtgcccttttggtgaagtttttaacgccaccagatttgcatctgtttatgcttggaacaggaagagaatcagcaactgtgttgctgattattctgtcctatataattccgcatcattttccacttttaagtgttatggagtgtctcctactaaattaaatgatctctgctttactaatgtctatgcagattcatttgtaattagaggtgatgaagtcagacaaatcgctccagggcaaactggaaagattgctgattataattataaattaccagatgattttacaggctgcgttatagcttggaattctaacaatcttgattctaaggttggtggtaattataattacctgtatagattgtttaggaagtctaatctcaaaccttttgagagagatatttcaactgaaatctatcaggccggtagcacaccttgtaatggtgttgaaggttttaattgttactttcctttacaatcatatggtttccaacccactaatggtgttggttaccaaccatacagagtagtagtactttcttttgaacttctacatgcaccagcaactgtttgtggacctaaaaagtctactaatttggttaaaaacaaatgtgtcaatttcaacttcaatggtttaacaggcacaggtgttcttactgagtctaacaaaaagtttctgcctttccaacaatttggcagagacattgctgacactactgatgctgtccgtgatccacagacacttgagattcttgacattacaccatgttcttttggtggtgtcagtgttataacaccaggaacaaatacttctaaccaggttgctgttctttatcagggtgttaactgcacagaagtccctgttgctattcatgcagatcaacttactcctacttggcgtgtttattctacaggttctaatgtttttcaaacacgtgcaggctgtttaataggggctgaacatgtcaacaactcatatgagtgtgacatacccattggtgcaggtatatgcgctagttatcagactcagactaattctcctcggcgggcacgtagtgtagctagtcaatccatcattgcctacactatgtcacttggtgcagaaaattcagttgcttactctaataactctattgccatacccacaaattttactattagtgttaccacagaaattctaccagtgtctatgaccaagacatcagtagattgtacaatgtacatttgtggtgattcaactgaatgcagcaatcttttgttgcaatatggcagtttttgtacacaattaaaccgtgctttaactggaatagctgttgaacaagacaaaaacacccaagaagtttttgcacaagtcaaacaaatttacaaaacaccaccaattaaagattttggtggttttaatttttcacaaatattaccagatccatcaaaaccaagcaagaggtcatttattgaagatctacttttcaacaaagtgacacttgcagatgctggcttcatcaaacaatatggtgattgccttggtgatattgctgctagagacctcatttgtgcacaaaagtttaacggccttactgttttgccacctttgctcacagatgaaatgattgctcaatacacttctgcactgttagcgggtacaatcacttctggttggacctttggtgcaggtgctgcattacaaataccatttgctatgcaaatggcttataggtttaatggtattggagttacacagaatgttctctatgagaaccaaaaattgattgccaaccaatttaatagtgctattggcaaaattcaagactcactttcttccacagcaagtgcacttggaaaacttcaagatgtggtcaaccaaaatgcacaagctttaaacacgcttgttaaacaacttagctccaattttggtgcaatttcaagtgttttaaatgatatcctttcacgtcttgacaaagttgaggctgaagtgcaaattgataggttgatcacaggcagacttcaaagtttgcagacatatgtgactcaacaattaattagagctgcagaaatcagagcttctgctaatcttgctgctactaaaatgtcagagtgtgtacttggacaatcaaaaagagttgatttttgtggaaagggctatcatcttatgtccttccctcagtcagcacctcatggtgtagtcttcttgcatgtgacttatgtccctgcacaagaaaagaacttcacaactgctcctgccatttgtcatgatggaaaagcacactttcctcgtgaaggtgtctttgtttcaaatggcacacactggtttgtaacacaaaggaatttttatgaaccacaaatcattactacagacaacacatttgtgtctggtaactgtgatgttgtaataggaattgtcaacaacacagtttatgatcctttgcaacctgaattagactcattcaaggaggagttagataaatattttaagaatcatacatcaccagatgttgatttaggtgacatctctggcattaatgcttcagttgtaaacattcaaaaagaaattgaccgcctcaatgaggttgccaagaatttaaatgaatctctcatcgatctccaagaacttggaaagtatgagcagtatataaaatggccatggtacatttggctaggttttatagctggcttgattgccatagtaatggtgacaattatgctttgctgtatgaccagttgctgtagttgtctcaagggctgttgttcttgtggatcctgctgcaaatttgatgaagacgnctctgagccagtgctcaaaggagtcaaattacattacacataaacgaacttatggatttgtttatgagaatcttcacaattggaactgtaactttgaagcaaggtgaaatcaaggatgctactccttcagattttgttcgcgctactgcaacgataccgatacaagcctcactccctttcggatggcttattgttggcgttgcacttcttgctgtttttcagagcgcttccaaaatcataaccctcaaaaagagatggcaactagcactctccaagggtgttcactttgtttgcaacttgctgttgttgtttgtaacagtttactcacaccttttgctcgttgctgctggccttgaagccccttttctctatctttatgctttagtctacttcttgcagagtataaactttgtaagaataataatgaggctttggctttgctggaaatgccgttccaaaaacccattactttatgatgccaactattttctttgctggcatactaattgttacgactattgtataccttacaatagtgtaacttcttcaattgtcattacttcaggtgatggcacaacaagtcctatttctgaacatgactaccagattggtggttatactgaaaaatgggaatctggagtaaaagactgtgttgtattacacagttacttcacttcagactattaccagctgtactcaactcaattgagtacagacactggtgttgaacatgttaccttcttcatctacaataaaattgttgatgagcctgaagaacatgtccaaattcacacaatcgacggttcatccggagttgttaatccagtaatggaaccaatttatgatgaaccgacgacgactactagcgtgcctttgtaagcacaagctgatgagtacgaacttatgtactcattcgtttcggaagagacaggtacgttaatagttaatagcgtacttctttttcttgctttcgtggtattcttgctagttacactagccatccttactgcgcttcgattgtgtgcgtactgctgcaatattgttaacgtgagtcttgtaaaaccttctttttacgtttactctcgtgttaaaaatctgaattcttctagagttcctgatcttccggtctaaacgaactaaatattatattagtttttctgtttggaactttaattttagccatggcagattccaacggtactattaccgttgaagagcttaaaaagctccttgaacaatggaacctagtaataggtttcctattccttacatggatttgtcttctacaatttgcctatgccaacaggaataggtttttgtatataattaagttaattttcctctggctgttatggccagtaactttagcttgttttgtgcttgctgctgtttacagaataaattggatcaccggtggaattgctatcgcaatggcttgtcttgtaggcttgatgtggctcagctacttcattgcttctttcagactgtttgcgcgtacgcgttccatgtggtcattcaatccagaaactaacattcttctcaacgtgccactccatggcactattctgaccagaccgcttctagaaagtgaactcgtaatcggagctgtgatccttcgtggacatcttcgtattgctggacaccatctaggacgctgtgacatcaaggacctgcctaaagaaatcactgttgctacatcacgaacgctttcttattacaaattgggagcttcgcagcgtgtagcaggtgactcaggttttgctgcatacagtcgctacaggattggcaactataaattaaacacagaccattccagtagcagtgacaatattgctttgcttgtacagtaagtgacaacagatgtttcatctcgttgactttcaggttactatagcagagatattactaattattatgaggacttttaaagtttccatttggaatcttgattacatcataaacctcataattaaaaatttatctaagtcactaactgagaataaatattctcaattagatgaagagcaaccaatggagattgattaaacgaacatgaaaattattcttttcttggcactgataacactcgctacttgtgagctttatcactaccaagagtgtgttagaggtacaacagtacttttaaaagaaccttgctcttctggaacatacgagggcaattcaccatttcatcctctagctgataacaaatttgcactgacttgctttagcactcaatttgcttttgcttgtcctgacggcgtaaaacacgtctatcagttacgtgccagatcagtttcacctaaactgttcatcagacaagaggaagttcaagaactttactctccaatttttcttattgttgcggcaatagtgtttataacactttgcttcacactcaaaagaaagacagaatgattgaactttcattaattgacttctatttgtgctttttagcctttctgctattccttgttttaattatgcttattatcttttggttctcacttgaactgcaagatcataatgaaacttgtcacgcctaaacgaacatgaaatttcttgttttcttaggaatcatcacaactgtagctgcatttcaccaagaatgtagtttacagtcatgtactcaacatcaaccatatgtagttgatgacccgtgtcctattcacttctattctaaatggtatattagagtaggagctagaaaatcagcacctttaattgaattgtgcgtggatgaggctggttctaaatcacccattcagtacatcgatatcggtaattatacagtttcctgtttaccttttacaattaattgccaggaacctaaattgggtagtcttgtagtgcgttgttcgttctatgaagactttttagagtatcatgacgttcgtgttgttttagatttcatctaaacgaacaaactaaaatgtctgataatggaccccaaaatcagcgaaatgcaccccgcattacgtttggtggaccctcagattcaactggcagtaaccagaatggagaacgcagtggggcgcgatcaaaacaacgtcggccccaaggtttacccaataatactgcgtcttggttcaccgctctcactcaacatggcaaggaagaccttaaattccctcgaggacaaggcgttccaattaacaccaatagcagtccagatgaccaaattggctactaccgaagagctaccagacgaattcgtggtggtgacggtaaaatgaaagatctcagtccaagatggtatttctactacctaggaactgggccagaagctggacttccctatggtgctaacaaagacggcatcatatgggttgcaactgagggagccttgaatacaccaaaagatcacattggcacccgcaatcctgctaacaatgctgcaatcgtgctacaacttcctcaaggaacaacattgccaaaaggcttctacgcagaagggagcagaggcggcagtcaagcctcttctcgttcctcatcacgtagtcgcaacagttcaagaaattcaactccaggcagcagtaggggaacttctcctgctagaatggctggcaatggcggtgatgctgctcttgctttgctgctgcttgacagattgaaccagcttgagagcaaaatgtctggtaaaggccaacaacaacaaggccaaactgtcactaagaaatctgctgctgaggcttctaagaagcctcggcaaaaacgtactgccactaaagcatacaatgtaacacaagctttcggcagacgtggtccagaacaaacccaaggaaattttggggaccaggaactaatcagacaaggaactgattacaaacattggccgcaaattgcacaatttgcccccagcgcttcagcgttcttcggaatgtcgcgcattggcatggaagtcacaccttcgggaacgtggttgacctacacaggtgccatcaaattggatgacaaagatccaaatttcaaagatcaagtcattttgctgaataagcatattgacgcatacaaaacattcccaccaacagagcctaaaaaggacaaaaagaagaaggctgatgaaactcaagccttaccgcagagacagaagaaacagcaaactgtgactcttcttcctgctgcagatttggatgatttctccaaacaattgcaacaatccatgagcagtgctgactcaactcaggcctaaactcatgcagaccacacaaggcagatgggctatataaacgttttcgcttttccgtttacgatatatagtctactcttgtgcagaatgaattctcgtaactacatagcacaagtagatgtagttaactttaatctcacatagcaatctttaatcagtgtgtaacattagggaggacttgaaagagccaccacattttcaccgaggccacgcggagtacgatcgagtgtacagtgaacaatgctagggagagctgcctatatggaagagccctaatgtgtaaaattaattttagtagtgctatccccatgtg

SEQ ID NO: 54 - DNA, 29808 bp, synthetic construct
  misc_feature 1..29808: note = Reconstituted virus 17
  source 1..29808: mol_type = other DNA
ccaactttcgatctcttgtagatctgttctctaaacgaactttaaaatctgtgtggctgtcactcggctgcatgcttagtgcactcacgcagtataattaataactaattactgtcgttgacaggacacgagtaactcgtctatcttctgcaggctgcttacggtttcgtccgtgttgcagccgatcatcagcacatctaggttttgtccgggtgtgaccgaaaggtaagatggagagccttgtccctggtttcaacgagaaaacacacgtccaactcagtttgcctgttttacaggttcgcgacgtgctcgtacgtggctttggagactccgtggaggaggtcttatcagaggcacgtcaacatcttaaagatggcacttgtggcttagtagaagttgaaaaaggcgttttgcctcaacttgaacagccctatgtgttcatcaaacgttcggatgctcgaactgcacctcatggtcatgttatggttgagctggtagcagaactcgaaggcattcagtacggtcgtagtggtgagacacttggtgtccttgtccctcatgtgggcgaaataccagtggcttaccgcaaggttcttcttcgtaagaacggtaataaaggagctggtggccatagttacggcgccgatctaaagtcatttgacttaggcgacgagcttggcactgatccttatgaagattttcaagaaaactggaacactaaacatagcagtggtgttacccgtgaactcatgcgtgagcttaacggaggggcatacactcgctatgtcgataacaacttctgtggccctgatggctaccctcttgagtgcattaaagaccttctagcacgtgctggtaaagcttcatgcactttgtccgaacaactggactttattgacactaagaggggtgtatactgctgccgtgaacatgagcatgaaattgcttggtacacggaacgttctgaaaagagctatgaattgcagacaccttttgaaattaaattggcaaagaaatttgacaccttcaatggggaatgtccaaattttgtatttcccttaaattccataatcaagactattcaaccaagggttgaaaagaaaaagcttgatggctttatgggtagaattcgatctgtctatccagttgcgtcaccaaatgaatgcaaccaaatgtgcctttcaactctcatgaagtgtgatcattgtggtgaaacttcatggcagacgggcgattttgttaaagccacttgcgaattttgtggcactgagaatttgactaaagaaggtgccactacttgtggttacttaccccaaaatgctgttgttaaaatttattgtccagcatgtcacaattcagaagtaggacctgagcatagtcttgccgaataccataatgaatctggcttgaaaaccattcttcgtaagggtggtcgcactattgcctttggaggctgtgtgttctcttatgttggttgccataacaagtgtgcctattgggttccacgtgctagcgctaacataggttgtaaccatacaggtgttgttggagaaggttccgaaggtcttaatgacaaccttcttgaaatactccaaaaagagaaagtcaacatcaatattgttggtgactttaaacttaatgaagagatcgccattattttggcatctttttctgcttccacaagtgcttttgtggaaactgtgaaaggtttggattataaagcattcaaacaaattgttgaatcctgtggtaattttaaagttacaaaaggaaaagctaaaaaaggtgcctggaatattggtgaacagaaatcaatactgagtcctctttatgcatttgcatcagaggctgctcgtgttgtacgatcaattttctcccgcactcttgaaactgctcaaaattctgtgcgtgttttacagaaggccgctataacaatactagatggaatttcacagtattcactgagactcattgatgctatgatgttcacatctgatttggctactaacaatctagttgtaatggcctacattacaggtggtgttgttcagttgacttcgcagtggctaactaacatctttggcactgtttatgaaaaactcaaacccgtccttgattggcttgaagagaagtttaaggaaggtgtagagtttcttagagacggttgggaaattgttaaatttatctcaacctgtgcttgtgaaattgtcggtggacaaattgtcacctgtgcaaaggaaattaaggagagtgttcagacattctttaagcttgtaaataaatttttggctttgtgtgctgactctatcattattggtggagctaaacttaaagccttgaatttaggtgaaacatttgtcacgcactcaaagggattgtacagaaagtgtgttaaatccagagaagaaactggcctactcatgcctctaaaagccccaaaagaaattatcttcttagagggagaaacacttcccacagaagtgttaacagaggaagttgtcttgaaaactggtgatttacaaccattagaacaacctactagtgaagctgttgaagctccattggttggtacaccagtttgtattaacgggcttatgttgctcgaaatcaaagacacagaaaagtactgtgcccttgcacctaatatgatggtaacaaacaataccttcacactcaaaggcggtgcaccaacaaaggttacttttggtgatgacactgtgatagaagtgcaaggttacaagagtgtgaatatcacttttgaacttgatgaaaggattgataaagtacttaatgagaagtgctctgcctatacagttgaactcggtacagaagtaaatgagttcgcctgtgttgtggcagatgctgtcataaaaactttgcaaccagtatctgaattacttacaccactgggcattgatttagatgagtggagtatggctacatactacttatttgatgagtctggtgagtttaaattggcttcacatatgtattgttctttttaccctccagatgaggatgaagaagaaggtgattgtgaagaagaagagtttgagccatcaactcaatatgagtatggtactgaagatgattaccaaggtaaacctttggaatttggtgccacttctgctgctcttcaacctgaagaagagcaagaagaagattggttagatgatgatagtcaacaaactgttggtcaacaagacggcagtgaggacaatcagacaactactattcaaacaattgttgaggttcaacctcaattagagatggaacttacaccagttgttcagactattgaagtgaatagttttagtggttatttaaaacttactgacaatgtatacattaaaaatgcagacattgtggaagaagctaaaaaggtaaaaccaacagtggttgttaatgcagccaatgtttaccttaaacatggaggaggtgttgcaggagccttaaataaggctactaacaatgccatgcaagttgaatctgatgattacatagctactaatggaccacttaaagtgggtggtagttgtgttttaagcggacacaatcttgctaaacactgtcttcatgttgtcggcccaaatgttaacaaaggtgaagacattcaacttcttaagagtgcttatgaaaattttaatcagcacgaagttctacttgcaccattattatcagctggtatttttggtgctgaccctatacattctttaagagtttgtgtagatactgttcgcacaaatgtctacttagctgtctttgataaaaatctctatgacaaacttgtttcaagctttttggaaatgaagagtgaaaagcaagttgaacaaaagatcgctgagattcctaaagaggaagttaagccatttataactgaaagtaaaccttcagttgaacagagaaaacaagatgataagaaaatcaaagcttgtgttgaagaagttacaacaactctggaagaaactaagttcctcacagaaaacttgttactttatattgacattaatggcaatcttcatccagattctgccactcttgttagtgacattgacatcactttcttaaagaaagatgctccatatatagtgggtgatgttgttcaagagggtgttttaactgctgtggttatacctactaaaaaggctggtggcactactgaaatgctagcgaaagctttgagaaaagtgccaacagacaattatataaccacttacccgggtcagggtttaaatggttacactgtagaggaggcaaagacagtgcttaaaaagtgtaaaagtgccttttacattctaccatctattatctctaatgagaagcaagaaattcttggaactgtttcttggaatttgcgagaaatgcttgcacatgcagaagaaacacgcaaattaatgcctgtctgtgtggaaactaaagccatagtttcaactatacagcgtaaatataagggtattaaaatacaagagggtgtggttgattatggtgctagattttacttttacaccagtaaaacaactgtagcgtcacttatcaacacacttaacgatctaaatgaaactcttgttacaatgccacttggctatgtaacacatggcttaaatttggaagaagctgctcggtatatgagatctctcaaagtgccagctacagtttctgtttcttcacctgatgctgttacagcgtataatggttatcttacttcttcttctaaaacacctgaagaacattttattgaaaccatctcacttgctggttcctataaagattggtcctattctggacaatctacacaactaggtatagaatttcttaagagaggtgataaaagtgtatattacactagtaatcctaccacattccacctagatggtgaagttatcacctttgacaatcttaagacacttctttctttgagagaagtgaggactattaaggtgtttacaacagtagacaacattaacctccacacgcaagttgtggacatgtcaatgacatatggacaacagtttggtccaacttatttggatggagctgatgttactaaaataaaacctcataattcacatgaaggtaaaacattttatgttttacctaatgatgacactctacgtgttgaggcttttgagtactaccacacaactgatcctagttttctgggtaggtacatgtcagcattaaatcacactaaaaagtggaaatacccacaagttaatggtttaacttctattaaatgggcagataacaactgttatcttgccactgcattgttaacactccaacaaatagagttgaagtttaatccacctgctctacaagatgcttattacagagcaagggctggtgaagctgctaacttttgtgcacttatcttagcctactgtaataagacagtaggtgagttaggtgatgttagagaaacaatgagttacttgtttcaacatgccaatttagattcttgcaaaagagtcttgaacgtggtgtgtaaaacttgtggacaacagcagacaacccttaagggtgtagaagctgttatgtacatgggcacactttcttatgaacaatttaagaaaggtgttcagataccttgtacgtgtggtaaacaagctacaaaatatctagtacaacaggagtcaccttttgttatgatgtcagcaccacctgctcagtatgaacttaagcatggtacatttacttgtgctagtgagtacactggtaattaccagtgtggtcactataaacatataacttctaaagaaactttgtattgcatagacggtgctttacttacaaagtcctcagaatacaaaggtcctattacggatgttttctacaaagaaaacagttacacaacaaccataaaaccagttacttataaattggatggtgttgtttgtacagaaattgaccctaagttggacaattattataagaaagacaattcttatttcacagagcaaccaattgatcttgtaccaaaccaaccatatccaaacgcaagcttcgataattttaagtttgtatgtgataatatcaaatttgctgatgatttaaaccagttaactggttataagaaacctgcttcaagagagcttaaagttacatttttccctgacttaaatggtgatgtggtggctattgattataaacactacacaccctcttttaagaaaggagctaaattgttacataaacctattgtttggcatgttaacaatgcaactaataaagccacgtataaaccaaatacctggtgtatacgttgtctttggagcacaaaaccagttgaaacatcaaattcgtttgatgtactgaagtcagaggacgcgcagggaatggataatcttgcctgcgaagatctaaaaccagtctctgaagaagtagtggaaaatcctaccatacagaaagacgttcttgagtgtaatgtgaaaactaccgaagttgtaggagacattatacttaaaccagcaaataatagtttaaaaattacagaagaggttggccacacagatctaatggctgcttatgtagacaattctagtcttactattaagaaacctaatgaattatctagagtattaggtttgaaaacccttgctactcatggtttagctgctgttaatagtgtcccttgggatactatagctaattatgctaagccttttcttaacaaagttgttagtacaactactaacatagttacacggtgtttaaaccgtgtttgtactaattatatgccttatttctttactttattgctacaattgtgtacttttactagaagtacaaattctagaattaaagcatctatgccgactactatagcaaagaatactgttaagagtgtcggtaaattttgtctagaggcttcatttaattatttgaagtcacctaatttttctaaactgataaatattataatttggtttttactattaagtgtttgcctaggttctttaatctactcaaccgctgctttaggtgttttaatgtctaatttaggcatgccttcttactgtactggttacagagaaggctatttgaactctactaatgtcactattgcaacctactgtactggttctataccttgtagtgtttgtcttagtggtttagattctttagacacctatccttctttagaaactatacaaattaccatttcatcttttaaatgggatttaactgcttttggcttagttgcagagtggtttttggcatatattcttttcactaggtttttctatgtacttggattggctgcaatcatgcaattgtttttcagctattttgcagtacattttattagtaattcttggcttatgtggttaataattaatcttgtacaaatggccccgatttcagctatggttagaatgtacatcttctttgcatcattttattatgtatggaaaagttatgtgcatgttgtagacggttgtaattcatcaacttgtatgatgtgttacaaacgtaatagagcaacaagagtcgaatgtacaactattgttaatggtgttagaaggtccttttatgtctatgctaatggaggtaaaggcttttgcaaactacacaattggaattgtgttaattgtgatacattctgtgctggtagtacatttattagtgatgaagttgcgagagacttgtcactacagtttaaaagaccaataaatcctactgaccagtcttcttacatcgttgatagtgttacagtgaagaatggttccatccatctttactttgataaagctggtcaaaagacttatgaaagacattctctctctcattttgttaacttagacaacctgagagctaataacactaaaggttcattgcctattaatgttatagtttttgatggtaaatcaaaatgtgaagaatcatctgcaaaatcagcgtctgtttactacagtcagcttatgtgtcaacctatactgttactagatcaggcattagtgtctgatgttggtgatagtgcggaagttgcagttaaaatgtttgatgcttacgttaatacgttttcatcaacttttaacgtaccaatggaaaaactcaaaacactagttgcaactgcagaagctgaacttgcaaagaatgtgtccttagacaatgtcttatctacttttatttcagcagctcggcaagggtttgttgattcagatgtagaaactaaagatgttgttgaatgtcttaaattgtcacatcaatctgacatagaagttactggcgatagttgtaataactatatgctcacctataacaaagttgaaaacatgacaccccgtgaccttggtgcttgtattgactgtagtgcgcgtcatattaatgcgcaggtagcaaaaagtcacaacattgctttgatatggaacgttaaagatttcatgtcattgtctgaacaactacgaaaacaaatacgtagtgctgctaaaaagaataacttaccttttaagttgacatgtgcaactactagacaagttgttaatgttgtaacaacaaagatagcacttaagggtggtaaaattgttaataattggttgaagcagttaattaaagttacacttgtgttcctttttgttgctgctattttctatttaataacacctgttcatgtcatgtctaaacatactgacttttcaagtgaaatcataggatacaaggctattgatggtggtgtcactcgtgacatagcatctacagatacttgttttgctaacaaacatgctgattttgacacatggtttagccagcgtggtggtagttatactaatgacaaagcttgcccattgattgctgcagtcataacaagagaagtgggttttgtcgtgcctggtttgcctggcacgatattacgcacaactaatggtgactttttgcatttcttacctagagtttttagtgcagttggtaacatctgttacacaccatcaaaacttatagagtacactgactttgcaacatcagcttgtgttttggctgctgaatgtacaatttttaaagatgcttctggtaagccagtaccatattgttatgataccaatgtactagaaggttctgttgcttatgaaagtttacgccctgacacacgttatgtgctcatggatggctctattattcaatttcctaacacctaccttgaaggttctgttagagtggtaacaacttttgattctgagtactgtaggcacggcacttgtgaaagatcagaagctggtgtttgtgtatctactagtggtagatgggtacttaacaatgattattacagatctttaccaggagttttctgtggtgtagatgctgtaaatttacttactaatatgtttacaccactaattcaacctattggtgctttggacatatcagcatctatagtagctggtggtattgtagctatcgtagtaacatgccttgcctactattttatgaggtttagaagagcttttggtgaatacagtcatgtagttgcctttaatactttactattccttatgtcattcactgtactctgtttaacaccagtttactcattcttacctggtgtttattctgttatttacttgtacttgacattttatcttactaatgatgtttcttttttagcacatattcagtggatggttatgttcacacctttagtacctttctggataacaattgcttatatcatttgtatttccacaaagcatttctattggttctttagtaattacctaaagagacgtgtagtctttaatggtgtttcctttagtacttttgaagaagctgcgctgtgcacctttttgttaaataaagaaatgtatctaaagttgcgtagtgatgtgctattacctcttacgcaatataatagatacttagctctttataataagtacaagtattttagtggagcaatggatacaactagctacagagaagctgcttgttgtcatctcgcaaaggctctcaatgacttcagtaactcaggttctgatgttctttaccaaccaccacaaacctctatcacctcagctgttttgcagagtggttttagaaaaatggcattcccatctggtaaagttgagggttgtatggtacaagtaacttgtggtacaactacacttaacggtctttggcttgatgacgtagtttactgtccaagacatgtgatctgcacctctgaagacatgcttaaccctaattatgaagatttactcattcgtaagtctaatcataatttcttggtacaggctggtaatgttcaactcagggttattggacattctatgcaaaattgtgtacttaagcttaaggttgatacagccaatcctaagacacctaagtataagtttgttcgcattcaaccaggacagactttttcagtgttagcttgttacaatggttcaccatctggtgtttaccaatgtgctatgaggcccaatttcactattaagggttcattccttaatggttcatgtggtagtgttggttttaacatagattatgactgtgtctctttttgttacatgcaccatatggaattaccaactggagttcatgctggcacagacttagaaggtaacttttatggaccttttgttgacaggcaaacagcacaagcagctggtacggacacaactattacagttaatgttttagcttggttgtacgctgctgttataaatggagacaggtggtttctcaatcgatttaccacaactcttaatgactttaaccttgtggctatgaagtacaattatgaacctctaacacaagaccatgttgacatactaggacctctttctgctcaaactggaattgccgttttagatatgtgtgcttcattaaaagaattactgcaaaatggtatgaatggacgtaccatattgggtagtgctttattagaagatgaatttacaccttttgatgttgttagacaatgctcaggtgttactttccaaagtgcagtgaaaagaacaatcaagggtacacaccactggttgttactcacaattttgacttcacttttagttttagtccagagtactcaatggtctttgttcttttttttgtatgaaaatgcctttttaccttttgctatgggtattattgctatgtctgcttttgcaatgatgtttgtcaaacataagcatgcatttctctgtttgtttttgttaccttctcttgccactgtagcttattttaatatggtctatatgcctgctagttgggtgatgcgtattatgacatggttggatatggttgatactagtttgtctggttttaagctaaaagactgtgttatgtatgcatcagctgtagtgttactaatccttatgacagcaagaactgtgtatgatgatggtgctaggagagtgtggacacttatgaatgtcttgacactcgtttataaagtttattatggtaatgctttagatcaagccatttccatgtgggctcttataatctctgttacttctaactactcaggtgtagttacaactgtcatgtttttggccagaggtattgtttttatgtgtgttgagtattgccctattttcttcataactggtaatacacttcagtgtataatgctagtttattgtttcttaggctatttttgtacttgttactttggcctcttttgtttactcaaccgctactttagactgactcttggtgtttatgattacttagtttctacacaggagtttagatatatgaattcacagggactactcccacccaagaatagcatagatgccttcaaactcaacattaaattgttgggtgttggtggcaaaccttgtatcaaagtagccactgtacagtctaaaatgtcagatgtaaagtgcacatcagtagtcttactctcagttttgcaacaactcagagtagaatcatcatctaaattgtgggctcaatgtgtccagttacacaatgacattctcttagctaaagatactactgaagcctttgaaaaaatggtttcactactttctgttttgctttccatgcagggtgctgtagacataaacaagctttgtgaagaaatgctggacaacagggcaaccttacaagctatagcctcagagtttagttcccttccatcatatgcagcttttgctactgctcaagaagcttatgagcaggctgttgctaatggtgattctgaagttgttcttaaaaagttgaagaagtctttgaatgtggctaaatctgaatttgaccgtgatgcagccatgcaacgtaagttggaaaagatggctgatcaagctatgacccaaatgtataaacaggctagatctgaggacaagagggcaaaagttactagtgctatgcagacaatgcttttcactatgcttagaaagttggataatgatgcactcaacaacattatcaacaatgcaagagatggttgtgttcccttgaacataatacctcttacaacagcagccaaactaatggttgtcataccagactataacacatataaaaatacgtgtgatggtacaacatttacttatgcatcagcattgtgggaaatccaacaggttgtagatgcagatagtaaaattgttcaacttagtgaaattagtatggacaattcacctaatttagcatggcctcttattgtaacagctttaagggccaattctgctgtcaaattacagaataatgagcttagtcctgttgcactacgacagatgtcttgtgctgccggtactacacaaactgcttgcactgatgacaatgcgttagcttactacaacacaacaaagggaggtaggtttgtacttgcactgttatccgatttacaggatttgaaatgggctagattccctaagagtgatggaactggtactatctatacagaactggaaccaccttgtaggtttgttacagacacacctaaaggtcctaaagtgaagtatttatactttattaaaggattaaacaacctaaatagaggtatggtacttggtagtttagctgccacagtacgtctacaagctggtaatgcaacagaagtgcctgccaattcaactgtattatctttctgtgcttttgctgtagatgctgctaaagcttacaaagattatctagctagtgggggacaaccaatcactaattgtgttaagatgttgtgtacacacactggtactggtcaggcaataacagttacaccggaagccaatatggatcaagaatcctttggtggtgcatcgtgttgtctgtactgccgttgccacatagatcatccaaatcctaaaggattttgtgacttaaaaggtaagtatgtacaaatacctacaacttgtgctaatgaccctgtgggttttacacttaaaaacacagtctgtaccgtctgcggtatgtggaaaggttatggctgtagttgtgatcaactccgcgaacccatgcttcagtcagctgatgcacaatcgtttttaaacgggtttgcggtgtaagtgcagcccgtcttacaccgtgcggcacaggcactagtactgatgtcgtatacagggcttttgacatctacaatgataaagtagctggttttgctaaattcctaaaaactaattgttgtcgcttccaagaaaaggacgaagatgacaatttaattgattcttactttgtagttaagagacacactttctctaactaccaacatgaagaaacaatttataatttacttaaggattgtccagctgttgctaaacatgacttctttaagtttagaatagacggtgacatggtaccacatatatcacgtcaacgtcttactaaatacacaatggcagacctcgtctatgctttaaggcattttgatgaaggtaattgtgacacattaaaagaaatacttgtcacatacaattgttgtgatgatgattatttcaataaaaaggactggtatgattttgtagaaaacccagatatattacgcgtatacgccaacttaggtgaacgtgtacgccaagctttgttaaaaacagtacaattctgtgatgccatgcgaaatgctggtattgttggtgtactgacattagataatcaagatctcaatggtaactggtatgatttcggtgatttcatacaaaccacgccaggtagtggagttcctgttgtagattcttattattcattgttaatgcctatattaaccttgaccagggctttaactgcagagtcacatgttgacactgacttaacaaagccttacattaagtgggatttgttaaaatatgacttcacggaagagaggttaaaactctttgaccgttattttaaatattgggatcagacataccacccaaattgtgttaactgtttggatgacagatgcattctgcattgtgcaaactttaatgttttattctctacagtgttcccacttacaagttttggaccactagtgagaaaaatatttgttgatggtgttccatttgtagtttcaactggataccacttcagagagctaggtgttgtacataatcaggatgtaaatttacatagctctagacttagttttaaggaattacttgtgtatgctgctgaccctgctatgcacgctgcttctggtaatctattactagataaacgcactacgtgcttttcagtagctgcacttactaacaatgttgcttttcaaactgtcaaacccggtaattttaacaaagacttctatgactttgctgtgtctaagggtttctttaaggaaggaagttctgttgaattaaaacacttcttctttgctcaggatggtaatgctgctatcagcgattatgactactatcgttataatctaccaacaatgtgtgatatcagacaactactatttgtagttgaagttgttgataagtactttgattgttacgatggtggctgtattaatgctaaccaagtcatcgtcaacaacctagacaaatcagctggttttccatttaataaatggggtaaggctagactttattatgattcaatgagttatgaggatcaagatgcacttttcgcatatacaaaacgtaatgtcatccctactataactcaaatgaatcttaagtatgccattagtgcaaagaatagagctcgcaccgtagctggtgtctctatctgtagtactatgaccaatagacagtttcatcaaaaattattgaaatcaatagccgccactagaggagctactgtagtaattggaacaagcaaattctatggtggttggcacaacatgttaaaaactgtttatagtgatgtagaaaaccctcaccttatgggttgggattatcctaaatgtgatagagccatgcctaacatgcttagaattatggcctcacttgttcttgctcgcaaacatacaacgtgttgtagcttgtcacaccgtttctatagattagctaatgagtgtgctcaagtattgagtgaaatggtcatgtgtggcggttcactatatgttaaaccaggtggaacctcatcaggagatgccacaactgcttatgctaatagtgtttttaacatttgtcaagctgtcacggccaatgttaatgcacttttatctactgatggtaacaaaattgccgataagtatgtccgcaatttacaacacagactttatgagtgtctctatagaaatagagatgttgacacagactttgtgaatgagttttacgcatatttgcgtaaacatttctcaatgatgatactctctgacgatgctgttgtgtgtttcaatagcacttatgcatctcaaggtctagtggctagcataaagaactttaagtcagttctttattatcaaaacaatgtttttatgtctgaagcaaaatgttggactgagactgaccttactaaaggacctcatgaattttgctctcaacatacaatgctagttaaacagggtgatgattatgtgtaccttccttacccagatccatcaagaatcctaggggccggctgttttgtagatgatatcgtaaaaacagatggtacacttatgattgaacggttcgtgtctttagctatagatgcttacccacttactaaacatcctaatcaggagtatgctgatgtctttcatttgtacttacaatacataagaaagctacatgatgagttaacaggacacatgttagacatgtattctgttatgcttactaatgataacacttcaaggtattgggaacctgagttttatgaggctatgtacacaccgcatacagtcttacaggctgttggggcttgtgttctttgcaattcacagacttcattaagatgtggtgcttgcatacgtagaccattcttatgttgtaaatgctgttacgaccatgtcatatcaacatcacataaattagtcttgtctgttaatccgtatgtttgcaatgctccaggttgtgatgtcacagatgtgactcaactttacttaggaggtatgagctattattgtaaatcacataaaccacccattagttttccattgtgtgctaatggacaagtttttggtttatataaaaatacatgtgttggtagcgataatgttactgactttaatgcaattgcaacatgtgactggacaaatgctggtgattacattttagctaacacctgtactgaaagactcaagctttttgcagcagaaacgctcaaagctactgaggagacatttaaactgtcttatggtattgctactgtacgtgaagtgctgtctgacagagaattacatctttcatgggaagttggtaaacctagaccaccacttaaccgaaattatgtctttactggttatcgtgtaactaaaaacagtaaagtacaaataggagagtacacctttgaaaaaggtgactatggtgatgctgttgtttaccgaggtacaacaacttacaaattaaatgttggtgattattttgtgctgacatcacatacagtaatgccattaagtgcacctacactagtgccacaagagcactatgttagaattactggcttatacccaacactcaatatctcagatgagttttctagcaatgttgcaaattatcaaaaggttggtatgcaaaagtattctacactccagggaccacctggtactggtaagagtcattttgctattggcctagctctctactacccttctgctcgcatagtgtatacagcttgctctcatgccgctgttgatgcactatgtgagaaggcattaaaatatttgcctatagataaatgtagtagaattatacctgcacgtgctcgtgtagagtgttttgataaattcaaagtgaattcaacattagaacagtatgtcttttgtactgtaaatgcattgcctgagacgacagcagatatagttgtctttgatgaaatttcaatggccacaaattatgatttgagtgttgtcaatgccagattacgtgctaagcactatgtgtacattggcgaccctgctcaattacctgcaccacgcacattgctaactaagggcacactagaaccagaatatttcaattcagtgtgtagacttatgaaaactataggtccagacatgttcctcggaacttgtcggcgttgtcctgctgaaattgttgacactgtgagtgctttggtttatgataataagcttaaagcacataaagacaaatcagctcaatgctttaaaatgttttataagggtgttatcacgcatgatgtttcatctgcaattaacaggccacaaataggcgtggtaagagaattccttacacgtaaccctgcttggagaaaagctgtctttatttcaccttataattcacagaatgctgtagcctcaaagattttgggactaccaactcaaactgttgattcatcacagggctcagaatatgactatgtcatattcactcaaaccactgaaacagctcactcttgtaatgtaaacagatttaatgttgctattaccagagcaaaagtaggcatactttgcataatgtctgatagagacctttatgacaagttgcaatttacaagtcttgaaattccacgtaggaatgtggcaactttacaagctgaaaatgtaacaggactctttaaagattgtagtaaggtaatcactgggttacatcctacacaggcacctacacacctcagtgttgacactaaattcaaaactgaaggtttatgtgttgacatacctggcatacctaaggacatgacctatagaagactcatctctatgatgggttttaaaatgaattatcaagttaatggttaccctaacatgtttatcacccgcgaagaagctataagacatgtacgtgcatggattggcttcgatgtcgaggggtgtcatgctactagagaagctgttggtaccaatttacctttacagctaggtttttctacaggtgttaacctagttgctgtacctacaggttatgttgatacacctaataatacagatttttccagagttagtgctaaaccaccgcctggagatcaatttaaacacctcataccacttatgtacaaaggacttccttggaatgtagtgcgtataaagattgtacaaatgttaagtgacacacttaaaaatctctctgacagagtcgtatttgtcttatgggcacatggctttgagttgacatctatgaagtattttgtgaaaataggacctgagcgcacctgttgtctatgtgatagacgtgccacatgcttttccactgcttcagacacttatgcctgttggcatcattctattggatttgattacgtctataatccgtttatgattgatgttcaacaatggggttttacaggtaacctacaaagcaaccatgatctgtattgtcaagtccatggtaatgcacatgtagctagttgtgatgcaatcatgactaggtgtctagctgtccacgagtgctttgttaagcgtgttgactggactattgaatatcctataattggtgatgaactgaagattaatgcggcttgtagaaaggttcaacacatggttgttaaagctgcattattagcagacaaattcccagttcttcacgacattggtaaccctaaagctattaagtgtgtacctcaagctgatgtagaatggaagttctatgatgcacagccttgtagtgacaaagcttataaaatagaagaattattctattcttatgccacacattctgacaaattcacagatggtgtatgcctattttggaattgcaatgtcgatagatatcctgctaattccattgtttgtagatttgacactagagtgctatctaaccttaacttgcctggttgtgatggtggcagtttgtatgtaaataaacatgcattccacacaccagcttttgataaaagtgcttttgttaatttaaaacaattaccatttttctattactctgacagtccatgtgagtctcatggaaaacaagtagtgtcagatatagattatgtaccactaaagtctgctacgtgtataacacgttgcaatttaggtggtgctgtctgtagacatcatgctaatgagtacagattgtatctcgatgcttataacatgatgatctcagctggctttagcttttgggtttacaaacaatttgatacttataacctctggaacacttttacaagacttcagagtttagaaaatgtggcttttaatgttgtaaataagggacactttgatggacaacagggtgaagtaccagtttctatcattaataacactgtttacacaaaagttgatggtgttgatgtagaattgtttgaaaataaaacaacattacctgttaatgtagcatttgagctttgggctaagcgcaacattaaaccagtaccagaggtgaaaatactcaataatttgggtgtggacattgctgctaatactgtgatctgggactacaaaagagatgctccagcacatatatctactattggtgtttgttctatgactgacatagccaagaaaccaactgaaacgatttgtgcaccactcactgtcttttttgatggtagagttgatggtcaagtagacttatttagaaatgcccgtaatggtgttcttattacagaaggtagtgttaaaggtttacaaccatctgtaggtcccaaacaagctagtcttaatggagtcacattaattggagaagccgtaaaaacacagttcaattattataagaaagttgatggtgttgtccaacaattacctgaaacttactttactcagagtagaaatttacaagaatttaaacccaggagtcaaatggaaattgatttcttagaattagctatggatgaattcattgaacggtataaattagaaggctatgccttcgaacatatcgtttatggagattttagtcatagtcagttaggtggtttacatctactgattggactagctaaacgttttaaggaatcaccttttgaattagaagattttattcctatggacagtacagttaaaaactatttcataacagatgcgcaaacaggttcatctaagtgtgtgtgttctgttattgatttattacttgatgattttgttgaaataataaaatcccaagatttatctgtagtttctaaggttgtcaaagtgactattgactatacagaaatttcatttatgctttggtgtaaagatggccatgtagaaacattttacccaaaattacaatctagtcaagcgtggcaaccgggtgttgctatgcctaatctttacaaaatgcaaagaatgctattagaaaagtgtgaccttcaaaattatggtgatagtgcaacattacctaaaggcataatgatgaatgtcgcaaaatatactcaactgtgtcaatatttaaacacattaacattagctgtaccctataatatgagagttatacattttggtgctggttctgataaaggagttgcaccaggtacagctgttttaagacagtggttgcctacgggtacgctgcttgtcgactcagatcttaatgactttgtctctgatgcagattcaactttgattggtgattgtgcaactgtacatacagctaataaatgggatctcattattagtgatatgtacgaccctaagactaaaaatgttacaaaagaaaatgactctaaagagggttttttcacttacatttgtgggtttatacaacaaaagctagctcttggaggttccgtggctataaagataacagaacattcttggaatgctgatctttataagctcatgggacacttcgcatggtggacagcctttgttactaatgtgaatgcgtcatcatctgaagcatttttaattggatgtaattatcttggcaaaccacgcgaacaaatagatggttatgtcatgcatgcaaattacatattttggaggaatacaaatccaattcagttgtcttcctattctttatttgacatgagtaaatttccccttaaattaaggggtactgctgttatgtctttaaaagaaggtcaaatcaatgatatgattttatctcttcttagtaaaggtagacttataattagagaaaacaacagagttgttatttctagtgatgttcttgttaacaactaaacgaacaatgtttgtttttcttgttttattgccactagtctctagtcagtgtgttaatcttacaaccagaactcaattaccccctgcatacactaattctttcacacgtggtgtttattaccctgacaaagttttcagatcctcagttttacattcaactcaggacttgttcttacctttcttttccaatgttacttggttccatgctatacatgtctctgggaccaatggtactaagaggtttgataaccctgtcctaccatttaatgatggtgtttattttgcttccactgagaagtctaacataataagaggctggatttttggtactactttagattcgaagacccagtccctacttattgttaataacgctactaatgttgttattaaagtctgtgaatttcaattttgtaatgatccatttttgggtgtttattaccacaaaaacaacaaaagttggatggaaagtgagttcagagtttattctagtgcgaataattgcacttttgaatatgtctctcagccttttcttatggaccttgaaggaaaacagggtaatttcaaaaatcttagggaatttgtgtttaagaatattgatggttattttaaaatatattctaagcacacgcctattaatttagtgcgtgatctccctcagggtttttcggctttagaaccattggtagatttgccaataggtattaacatcactaggtttcaaactttacttgctttacatagaagttatttgactcctggtgattcttcttcaggttggacagctggtgctgcagcttattatgtgggttatcttcaacctaggacttttctattaaaatataatgaaaatggaaccattacagatgctgtagactgtgcacttgaccctctctcagaaacaaagtgtacgttgaaatccttcactgtagaaaaaggaatctatcaaacttctaactttagagtccaaccaacagaatctattgttagatttcctaatattacaaacttgtgcccttttggtgaagtttttaacgccaccagatttgcatctgtttatgcttggaacaggaagagaatcagcaactgtgttgctgattattctgtcctatataattccgcatcattttccacttttaagtgttatggagtgtctcctactaaattaaatgatctctgctttactaatgtctatgcagattcatttgtaattagaggtgatgaagtcagacaaatcgctccagggcaaactggaaagattgctgattataattataaattaccagatgattttacaggctgcgttatagcttggaattctaacaatcttgattctaaggttggtggtaattataattacctgtatagattgtttaggaagtctaatctcaaaccttttgagagagatatttcaactgaaatctatcaggccggtagcacaccttgtaatggtgttgaaggttttaattgttactttcctttacaatcatatggtttccaacccactaatggtgttggttaccaaccatacagagtagtagtactttcttttgaacttctacatgcaccagcaactgtttgtggacctaaaaagtctactaatttggttaaaaacaaatgtgtcaatttcaacttcaatggtttaacaggcacaggtgttcttactgagtctaacaaaaagtttctgcctttccaacaatttggcagagacattgctgacactactgatgctgtccgtgatccacagacacttgagattcttgacattacaccatgttcttttggtggtgtcagtgttataacaccaggaacaaatacttctaaccaggttgctgttctttatcagggtgttaactgcacagaagtccctgttgctattcatgcagatcaacttactcctacttggcgtgtttattctacaggttctaatgtttttcaaacacgtgcaggctgtttaataggggctgaacatgtcaacaactcatatgagtgtgacatacccattggtgcaggtatatgcgctagttatcagactcagactaattctcctcggcgggcacgtagtgtagctagtcaatccatcattgcctacactatgtcacttggtgcagaaaattcagttgcttactctaataactctattgccatacccacaaattttactattagtgttaccacagaaattctaccagtgtctatgaccaagacatcagtagattgtacaatgtacatttgtggtgattcaactgaatgcagcaatcttttgttgcaatatggcagtttttgtacacaattaaaccgtgctttaactggaatagctgttgaacaagacaaaaacacccaagaagtttttgcacaagtcaaacaaatttacaaaacaccaccaattaaagattttggtggttttaatttttcacaaatattaccagatccatcaaaaccaagcaagaggtcatttattgaagatctacttttcaacaaagtgacacttgcagatgctggcttcatcaaacaatatggtgattgccttggtgatattgctgctagagacctcatttgtgcacaaaagtttaacggccttactgttttgccacctttgctcacagatgaaatgattgctcaatacacttctgcactgttagcgggtacaatcacttctggttggacctttggtgcaggtgctgcattacaaataccatttgctatgcaaatggcttataggtttaatggtattggagttacacagaatgttctctatgagaaccaaaaattgattgccaaccaatttaatagtgctattggcaaaattcaagactcactttcttccacagcaagtgcacttggaaaacttcaagatgtggtcaaccaaaatgcacaagctttaaacacgcttgttaaacaacttagctccaattttggtgcaatttcaagtgttttaaatgatatcctttcacgtcttgacaaagttgaggctgaagtgcaaattgataggttgatcacaggcagacttcaaagtttgcagacatatgtgactcaacaattaattagagctgcagaaatcagagcttctgctaatcttgctgctactaaaatgtcagagtgtgtacttggacaatcaaaaagagttgatttttgtggaaagggctatcatcttatgtccttccctcagtcagcacctcatggtgtagtcttcttgcatgtgacttatgtccctgcacaagaaaagaacttcacaactgctcctgccatttgtcatgatggaaaagcacactttcctcgtgaaggtgtctttgtttcaaatggcacacactggtttgtaacacaaaggaatttttatgaaccacaaatcattactacagacaacacatttgtgtctggtaactgtgatgttgtaataggaattgtcaacaacacagtttatgatcctttgcaacctgaattagactcattcaaggaggagttagataaatattttaagaatcatacatcaccagatgttgatttaggtgacatctctggcattaatgcttcagttgtaaacattcaaaaagaaattgaccgcctcaatgaggttgccaagaatttaaatgaatctctcatcgatctccaagaacttggaaagtatgagcagtatataaaatggccatggtacatttggctaggttttatagctggcttgattgccatagtaatggtgacaattatgctttgctgtatgaccagttgctgtagttgtctcaagggctgttgttcttgtggatcctgctgcaaatttgatgnnnnnnactctgagccagtgctcaaaggagtcaaattacattacacataaacgaacttatggatttgtttatgagaatcttcacaattggaactgtaactttgaagcaaggtgaaatcaaggatgctactccttcagattttgttcgcgctactgcaacgataccgatacaagcctcactccctttcggatggcttattgttggcgttgcacttcttgctgtttttcagagcgcttccaaaatcataaccctcaaaaagagatggcaactagcactctccaagggtgttcactttgtttgcaacttgctgttgttgtttgtaacagtttactcacaccttttgctcgttgctgctggccttgaagccccttttctctatctttatgctttagtctacttcttgcagagtataaactttgtaagaataataatgaggctttggctttgctggaaatgccgttccaaaaacccattactttatgatgccaactattttctttgctggcatactaattgttacgactattgtataccttacaatagtgtaacttcttcaattgtcattacttcaggtgatggcacaacaagtcctatttctgaacatgactaccagattggtggttatactgaaaaatgggaatctggagtaaaagactgtgttgtattacacagttacttcacttcagactattaccagctgtactcaactcaattgagtacagacactggtgttgaacatgttaccttcttcatctacaataaaattgttgatgagcctgaagaacatgtccaaattcacacaatcgacggttcatccggagttgttaatccagtaatggaaccaatttatgatgaaccgacgacgactactagcgtgcctttgtaagcacaagctgatgagtacgaacttatgtactcattcgtttcggaagagacaggtacgttaatagttaatagcgtacttctttttcttgctttcgtggtattcttgctagttacactagccatccttactgcgcttcgattgtgtgcgtactgctgcaatattgttaacgtgagtcttgtaaaaccttctttttacgtttactctcgtgttaaaaatctgaattcttctagagttcctgatcttccggtctaaacgaactaaatattatattagtttttctgtttggaactttaattttagccatggcagattccaacggtactattaccgttgaagagcttaaaaagctccttgaacaatggaacctagtaataggtttcctattccttacatggatttgtcttctacaatttgcctatgccaacaggaataggtttttgtatataattaagttaattttcctctggctgttatggccagtaactttagcttgttttgtgcttgctgctgtttacagaataaattggatcaccggtggaattgctatcgcaatggcttgtcttgtaggcttgatgtggctcagctacttcattgcttctttcagactgtttgcgcgtacgcgttccatgtggtcattcaatccagaaactaacattcttctcaacgtgccactccatggcactattctgaccagaccgcttctagaaagtgaactcgtaatcggagctgtgatccttcgtggacatcttcgtattgctggacaccatctaggacgctgtgacatcaaggacctgcctaaagaaatcactgttgctacatcacgaacgctttcttattacaaattgggagcttcgcagcgtgtagcaggtgactcaggttttgctgcatacagtcgctacaggattggcaactataaattaaacacagaccattccagtagcagtgacaatattgctttgcttgtacagtaagtgacaacagatgtttcatctcgttgactttcaggttactatagcagagatattactaattattatgaggacttttaaagtttccatttggaatcttgattacatcataaacctcataattaaaaatttatctaagtcactaactgagaataaatattctcaattagatgaagagcaaccaatggagattgattaaacgaacatgaaaattattcttttcttggcactgataacactcgctacttgtgagctttatcactaccaagagtgtgttagaggtacaacagtacttttaaaagaaccttgctcttctggaacatacgagggcaattcaccatttcatcctctagctgataacaaatttgcactgacttgctttagcactcaatttgcttttgcttgtcctgacggcgtaaaacacgtctatcagttacgtgccagatcagtttcacctaaactgttcatcagacaagaggaagttcaagaactttactctccaatttttcttattgttgcggcaatagtgtttataacactttgcttcacactcaaaagaaagacagaatgattgaactttcattaattgacttctatttgtgctttttagcctttctgctattccttgttttaattatgcttattatcttttggttctcacttgaactgcaagatcataatgaaacttgtcacgcctaaacgaacatgaaatttcttgttttcttaggaatcatcacaactgtagctgcatttcaccaagaatgtagtttacagtcatgtactcaacatcaaccatatgtagttgatgacccgtgtcctattcacttctattctaaatggtatattagagtaggagctagaaaatcagcacctttaattgaattgtgcgtggatgaggctggttctaaatcacccattcagtacatcgatatcggtaattatacagtttcctgtttaccttttacaattaattgccaggaacctaaattgggtagtcttgtagtgcgttgttcgttctatgaagactttttagagtatcatgacgttcgtgttgttttagatttcatctaaacgaacaaactaaaatgtctgataatggaccccaaaatcagcgaaatgcaccccgcattacgtttggtggaccctcagattcaactggcagtaaccagaatggagaacgcagtggggcgcgatcaaaacaacgtcggccccaaggtttacccaataatactgcgtcttggttcaccgctctcactcaacatggcaaggaagaccttaaattccctcgaggacaaggcgttccaattaacaccaatagcagtccagatgaccaaattggctactaccgaagagctaccagacgaattcgtggtggtgacggtaaaatgaaagatctcagtccaagatggtatttctactacctaggaactgggccagaagctggacttccctatggtgctaacaaagacggcatcatatgggttgcaactgagggagccttgaatacaccaaaagatcacattggcacccgcaatcctgctaacaatgctgcaatcgtgctacaacttcctcaaggaacaacattgccaaaaggcttctacgcagaagggagcagaggcggcagtcaagcctcttctcgttcctcatcacgtagtcgcaacagttcaagaaattcaactccaggcagcagtaggggaacttctcctgctagaatggctggcaatggcggtgatgctgctcttgctttgctgctgcttgacagattgaaccagcttgagagcaaaatgtctggtaaaggccaacaacaacaaggccaaactgtcactaagaaatctgctgctgaggcttctaagaagcctcggcaaaaacgtactgccactaaagcatacaatgtaacacaagctttcggcagacgtggtccagaacaaacccaaggaaattttggggaccaggaactaatcagacaaggaactgattacaaacattggccgcaaattgcacaatttgcccccagcgcttcagcgttcttcggaatgtcgcgcattggcatggaagtcacaccttcgggaacgtggttgacctacacaggtgccatcaaattggatgacaaagatccaaatttcaaagatcaagtcattttgctgaataagcatattgacgcatacaaaacattcccaccaacagagcctaaaaaggacaaaaagaagaaggctgatgaaactcaagccttaccgcagagacagaagaaacagcaaactgtgactcttcttcctgctgcagatttggatgatttctccaaacaattgcaacaatccatgagcagtgctgactcaactcaggcctaaactcatgcagaccacacaaggcagatgggctatataaacgttttcgcttttccgtttacgatatatagtctactcttgtgcagaatgaattctcgtaactacatagcacaagtagatgtagttaactttaatctcacatagcaatctttaatcagtgtgtaacattagggaggacttgaaagagccaccacattttcaccgaggccacgcggagtacgatcgagtgtacagtgaacaatgctagggagagctgcctatatggaagagccctaatgtgtaaaattaattttagtagtgctatccccatgtg

SEQ ID NO: 55 - DNA, 29809 bp, synthetic construct
  misc_feature 1..29809: note = Reconstituted virus 18
  source 1..29809: mol_type = other DNA
accaactttcgatctcttgtagatctgttctctaaacgaactttaaaatctgtgtggctgtcactcggctgcatgcttagtgcactcacgcagtataattaataactaattactgtcgttgacaggacacgagtaactcgtctatcttctgcaggctgcttacggtttcgtccgtgttgcagccgatcatcagcacatctaggttttgtccgggtgtgaccgaaaggtaagatggagagccttgtccctggtttcaacgagaaaacacacgtccaactcagtttgcctgttttacaggttcgcgacgtgctcgtacgtggctttggagactccgtggaggaggtcttatcagaggcacgtcaacatcttaaagatggcacttgtggcttagtagaagttgaaaaaggcgttttgcctcaacttgaacagccctatgtgttcatcaaacgttcggatgctcgaactgcacctcatggtcatgttatggttgagctggtagcagaactcgaaggcattcagtacggtcgtagtggtgagacacttggtgtccttgtccctcatgtgggcgaaataccagtggcttaccgcaaggttcttcttcgtaagaacggtaataaaggagctggtggccatagttacggcgccgatctaaagtcatttgacttaggcgacgagcttggcactgatccttatgaagattttcaagaaaactggaacactaaacatagcagtggtgttacccgtgaactcatgcgtgagcttaacggaggggcatacactcgctatgtcgataacaacttctgtggccctgatggctaccctcttgagtgcattaaagaccttctagcacgtgctggtaaagcttcatgcactttgtccgaacaactggactttattgacactaagaggggtgtatactgctgccgtgaacatgagcatgaaattgcttggtacacggaacgttctgaaaagagctatgaattgcagacaccttttgaaattaaattggcaaagaaatttgacaccttcaatggggaatgtccaaattttgtatttcccttaaattccataatcaagactattcaaccaagggttgaaaagaaaaagcttgatggctttatgggtagaattcgatctgtctatccagttgcgtcaccaaatgaatgcaaccaaatgtgcctttcaactctcatgaagtgtgatcattgtggtgaaacttcatggcagacgggcgattttgttaaagccacttgcgaattttgtggcactgagaatttgactaaagaaggtgccactacttgtggttacttaccccaaaatgctgttgttaaaatttattgtccagcatgtcacaattcagaagtaggacctgagcatagtcttgccgaataccataatgaatctggcttgaaaaccattcttcgtaagggtggtcgcactattgcctttggaggctgtgtgttctcttatgttggttgccataacaagtgtgcctattgggttccacgtgctagcgctaacataggttgtaaccatacaggtgttgttggagaaggttccgaaggtcttaatgacaaccttcttgaaatactccaaaaagagaaagtcaacatcaatattgttggtgactttaaacttaatgaagagatcgccattattttggcatctttttctgcttccacaagtgcttttgtggaaactgtgaaaggtttggattataaagcattcaaacaaattgttgaatcctgtggtaattttaaagttacaaaaggaaaagctaaaaaaggtgcctggaatattggtgaacagaaatcaatactgagtcctctttatgcatttgcatcagaggctgctcgtgttgtacgatcaattttctcccgcactcttgaaactgctcaaaattctgtgcgtgttttacagaaggccgctataacaatactagatggaatttcacagtattcactgagactcattgatgctatgatgttcacatctgatttggctactaacaatctagttgtaatggcctacattacaggtggtgttgttcagttgacttcgcagtggctaactaacatctttggcactgtttatgaaaaactcaaacccgtccttgattggcttgaagagaagtttaaggaaggtgtagagtttcttagagacggttgggaaattgttaaatttatctcaacctgtgcttgtgaaattgtcggtggacaaattgtcacctgtgcaaaggaaattaaggagagtgttcagacattctttaagcttgtaaataaatttttggctttgtgtgctgactctatcattattggtggagctaaacttaaagccttgaatttaggtgaaacatttgtcacgcactcaaagggattgtacagaaagtgtgttaaatccagagaagaaactggcctactcatgcctctaaaagccccaaaagaaattatcttcttagagggagaaacacttcccacagaagtgttaacagaggaagttgtcttgaaaactggtgatttacaaccattagaacaacctactagtgaagctgttgaagctccattggttggtacaccagtttgtattaacgggcttatgttgctcgaaatcaaagacacagaaaagtactgtgcccttgcacctaatatgatggtaacaaacaataccttcacactcaaaggcggtgcaccaacaaaggttacttttggtgatgacactgtgatagaagtgcaaggttacaagagtgtgaatatcacttttgaacttgatgaaaggattgataaagtacttaatgagaagtgctctgcctatacagttgaactcggtacagaagtaaatgagttcgcctgtgttgtggcagatgctgtcataaaaactttgcaaccagtatctgaattacttacaccactgggcattgatttagatgagtggagtatggctacatactacttatttgatgagtctggtgagtttaaattggcttcacatatgtattgttctttttaccctccagatgaggatgaagaagaaggtgattgtgaagaagaagagtttgagccatcaactcaatatgagtatggtactgaagatgattaccaaggtaaacctttggaatttggtgccacttctgctgctcttcaacctgaagaagagcaagaagaagattggttagatgatgatagtcaacaaactgttggtcaacaagacggcagtgaggacaatcagacaactactattcaaacaattgttgaggttcaacctcaattagagatggaacttacaccagttgttcagactattgaagtgaatagttttagtggttatttaaaacttactgacaatgtatacattaaaaatgcagacattgtggaagaagctaaaaaggtaaaaccaacagtggttgttaatgcagccaatgtttaccttaaacatggaggaggtgttgcaggagccttaaataaggctactaacaatgccatgcaagttgaatctgatgattacatagctactaatggaccacttaaagtgggtggtagttgtgttttaagcggacacaatcttgctaaacactgtcttcatgttgtcggcccaaatgttaacaaaggtgaagacattcaacttcttaagagtgcttatgaaaattttaatcagcacgaagttctacttgcaccattattatcagctggtatttttggtgctgaccctatacattctttaagagtttgtgtagatactgttcgcacaaatgtctacttagctgtctttgataaaaatctctatgacaaacttgtttcaagctttttggaaatgaagagtgaaaagcaagttgaacaaaagatcgctgagattcctaaagaggaagttaagccatttataactgaaagtaaaccttcagttgaacagagaaaacaagatgataagaaaatcaaagcttgtgttgaagaagttacaacaactctggaagaaactaagttcctcacagaaaacttgttactttatattgacattaatggcaatcttcatccagattctgccactcttgttagtgacattgacatcactttcttaaagaaagatgctccatatatagtgggtgatgttgttcaagagggtgttttaactgctgtggttatacctactaaaaaggctggtggcactactgaaatgctagcgaaagctttgagaaaagtgccaacagacaattatataaccacttacccgggtcagggtttaaatggttacactgtagaggaggcaaagacagtgcttaaaaagtgtaaaagtgccttttacattctaccatctattatctctaatgagaagcaagaaattcttggaactgtttcttggaatttgcgagaaatgcttgcacatgcagaagaaacacgcaaattaatgcctgtctgtgtggaaactaaagccatagtttcaactatacagcgtaaatataagggtattaaaatacaagagggtgtggttgattatggtgctagattttacttttacaccagtaaaacaactgtagcgtcacttatcaacacacttaacgatctaaatgaaactcttgttacaatgccacttggctatgtaacacatggcttaaatttggaagaagctgctcggtatatgagatctctcaaagtgccagctacagtttctgtttcttcacctgatgctgttacagcgtataatggttatcttacttcttcttctaaaacacctgaagaacattttattgaaaccatctcacttgctggttcctataaagattggtcctattctggacaatctacacaactaggtatagaatttcttaagagaggtgataaaagtgtatattacactagtaatcctaccacattccacctagatggtgaagttatcacctttgacaatcttaagacacttctttctttgagagaagtgaggactattaaggtgtttacaacagtagacaacattaacctccacacgcaagttgtggacatgtcaatgacatatggacaacagtttggtccaacttatttggatggagctgatgttactaaaataaaacctcataattcacatgaaggtaaaacattttatgttttacctaatgatgacactctacgtgttgaggcttttgagtactaccacacaactgatcctagttttctgggtaggtacatgtcagcattaaatcacactaaaaagtggaaatacccacaagttaatggtttaacttctattaaatgggcagataacaactgttatcttgccactgcattgttaacactccaacaaatagagttgaagtttaatccacctgctctacaagatgcttattacagagcaagggctggtgaagctgctaacttttgtgcacttatcttagcctactgtaataagacagtaggtgagttaggtgatgttagagaaacaatgagttacttgtttcaacatgccaatttagattcttgcaaaagagtcttgaacgtggtgtgtaaaacttgtggacaacagcagacaacccttaagggtgtagaagctgttatgtacatgggcacactttcttatgaacaatttaagaaaggtgttcagataccttgtacgtgtggtaaacaagctacaaaatatctagtacaacaggagtcaccttttgttatgatgtcagcaccacctgctcagtatgaacttaagcatggtacatttacttgtgctagtgagtacactggtaattaccagtgtggtcactataaacatataacttctaaagaaactttgtattgcatagacggtgctttacttacaaagtcctcagaatacaaaggtcctattacggatgttttctacaaagaaaacagttacacaacaaccataaaaccagttacttataaattggatggtgttgtttgtacagaaattgaccctaagttggacaattattataagaaagacaattcttatttcacagagcaaccaattgatcttgtaccaaaccaaccatatccaaacgcaagcttcgataattttaagtttgtatgtgataatatcaaatttgctgatgatttaaaccagttaactggttataagaaacctgcttcaagagagcttaaagttacatttttccctgacttaaatggtgatgtggtggctattgattataaacactacacaccctcttttaagaaaggagctaaattgttacataaacctattgtttggcatgttaacaatgcaactaataaagccacgtataaaccaaatacctggtgtatacgttgtctttggagcacaaaaccagttgaaacatcaaattcgtttgatgtactgaagtcagaggacgcgcagggaatggataatcttgcctgcgaagatctaaaaccagtctctgaagaagtagtggaaaatcctaccatacagaaagacgttcttgagtgtaatgtgaaaactaccgaagttgtaggagacattatacttaaaccagcaaataatagtttaaaaattacagaagaggttggccacacagatctaatggctgcttatgtagacaattctagtcttactattaagaaacctaatgaattatctagagtattaggtttgaaaacccttgctactcatggtttagctgctgttaatagtgtcccttgggatactatagctaattatgctaagccttttcttaacaaagttgttagtacaactactaacatagttacacggtgtttaaaccgtgtttgtactaattatatgccttatttctttactttattgctacaattgtgtacttttactagaagtacaaattctagaattaaagcatctatgccgactactatagcaaagaatactgttaagagtgtcggtaaattttgtctagaggcttcatttaattatttgaagtcacctaatttttctaaactgataaatattataatttggtttttactattaagtgtttgcctaggttctttaatctactcaaccgctgctttaggtgttttaatgtctaatttaggcatgccttcttactgtactggttacagagaaggctatttgaactctactaatgtcactattgcaacctactgtactggttctataccttgtagtgtttgtcttagtggtttagattctttagacacctatccttctttagaaactatacaaattaccatttcatcttttaaatgggatttaactgcttttggcttagttgcagagtggtttttggcatatattcttttcactaggtttttctatgtacttggattggctgcaatcatgcaattgtttttcagctattttgcagtacattttattagtaattcttggcttatgtggttaataattaatcttgtacaaatggccccgatttcagctatggttagaatgtacatcttctttgcatcattttattatgtatggaaaagttatgtgcatgttgtagacggttgtaattcatcaacttgtatgatgtgttacaaacgtaatagagcaacaagagtcgaatgtacaactattgttaatggtgttagaaggtccttttatgtctatgctaatggaggtaaaggcttttgcaaactacacaattggaattgtgttaattgtgatacattctgtgctggtagtacatttattagtgatgaagttgcgagagacttgtcactacagtttaaaagaccaataaatcctactgaccagtcttcttacatcgttgatagtgttacagtgaagaatggttccatccatctttactttgataaagctggtcaaaagacttatgaaagacattctctctctcattttgttaacttagacaacctgagagctaataacactaaaggttcattgcctattaatgttatagtttttgatggtaaatcaaaatgtgaagaatcatctgcaaaatcagcgtctgtttactacagtcagcttatgtgtcaacctatactgttactagatcaggcattagtgtctgatgttggtgatagtgcggaagttgcagttaaaatgtttgatgcttacgttaatacgttttcatcaacttttaacgtaccaatggaaaaactcaaaacactagttgcaactgcagaagctgaacttgcaaagaatgtgtccttagacaatgtcttatctacttttatttcagcagctcggcaagggtttgttgattcagatgtagaaactaaagatgttgttgaatgtcttaaattgtcacatcaatctgacatagaagttactggcgatagttgtaataactatatgctcacctataacaaagttgaaaacatgacaccccgtgaccttggtgcttgtattgactgtagtgcgcgtcatattaatgcgcaggtagcaaaaagtcacaacattgctttgatatggaacgttaaagatttcatgtcattgtctgaacaactacgaaaacaaatacgtagtgctgctaaaaagaataacttaccttttaagttgacatgtgcaactactagacaagttgttaatgttgtaacaacaaagatagcacttaagggtggtaaaattgttaataattggttgaagcagttaattaaagttacacttgtgttcctttttgttgctgctattttctatttaataacacctgttcatgtcatgtctaaacatactgacttttcaagtgaaatcataggatacaaggctattgatggtggtgtcactcgtgacatagcatctacagatacttgttttgctaacaaacatgctgattttgacacatggtttagccagcgtggtggtagttatactaatgacaaagcttgcccattgattgctgcagtcataacaagagaagtgggttttgtcgtgcctggtttgcctggcacgatattacgcacaactaatggtgactttttgcatttcttacctagagtttttagtgcagttggtaacatctgttacacaccatcaaaacttatagagtacactgactttgcaacatcagcttgtgttttggctgctgaatgtacaatttttaaagatgcttctggtaagccagtaccatattgttatgataccaatgtactagaaggttctgttgcttatgaaagtttacgccctgacacacgttatgtgctcatggatggctctattattcaatttcctaacacctaccttgaaggttctgttagagtggtaacaacttttgattctgagtactgtaggcacggcacttgtgaaagatcagaagctggtgtttgtgtatctactagtggtagatgggtacttaacaatgattattacagatctttaccaggagttttctgtggtgtagatgctgtaaatttacttactaatatgtttacaccactaattcaacctattggtgctttggacatatcagcatctatagtagctggtggtattgtagctatcgtagtaacatgccttgcctactattttatgaggtttagaagagcttttggtgaatacagtcatgtagttgcctttaatactttactattccttatgtcattcactgtactctgtttaacaccagtttactcattcttacctggtgtttattctgttatttacttgtacttgacattttatcttactaatgatgtttcttttttagcacatattcagtggatggttatgttcacacctttagtacctttctggataacaattgcttatatcatttgtatttccacaaagcatttctattggttctttagtaattacctaaagagacgtgtagtctttaatggtgtttcctttagtacttttgaagaagctgcgctgtgcacctttttgttaaataaagaaatgtatctaaagttgcgtagtgatgtgctattacctcttacgcaatataatagatacttagctctttataataagtacaagtattttagtggagcaatggatacaactagctacagagaagctgcttgttgtcatctcgcaaaggctctcaatgacttcagtaactcaggttctgatgttctttaccaaccaccacaaacctctatcacctcagctgttttgcagagtggttttagaaaaatggcattcccatctggtaaagttgagggttgtatggtacaagtaacttgtggtacaactacacttaacggtctttggcttgatgacgtagtttactgtccaagacatgtgatctgcacctctgaagacatgcttaaccctaattatgaagatttactcattcgtaagtctaatcataatttcttggtacaggctggtaatgttcaactcagggttattggacattctatgcaaaattgtgtacttaagcttaaggttgatacagccaatcctaagacacctaagtataagtttgttcgcattcaaccaggacagactttttcagtgttagcttgttacaatggttcaccatctggtgtttaccaatgtgctatgaggcccaatttcactattaagggttcattccttaatggttcatgtggtagtgttggttttaacatagattatgactgtgtctctttttgttacatgcaccatatggaattaccaactggagttcatgctggcacagacttagaaggtaacttttatggaccttttgttgacaggcaaacagcacaagcagctggtacggacacaactattacagttaatgttttagcttggttgtacgctgctgttataaatggagacaggtggtttctcaatcgatttaccacaactcttaatgactttaaccttgtggctatgaagtacaattatgaacctctaacacaagaccatgttgacatactaggacctctttctgctcaaactggaattgccgttttagatatgtgtgcttcattaaaagaattactgcaaaatggtatgaatggacgtaccatattgggtagtgctttattagaagatgaatttacaccttttgatgttgttagacaatgctcaggtgttactttccaaagtgcagtgaaaagaacaatcaagggtacacaccactggttgttactcacaattttgacttcacttttagttttagtccagagtactcaatggtctttgttcttttttttgtatgaaaatgcctttttaccttttgctatgggtattattgctatgtctgcttttgcaatgatgtttgtcaaacataagcatgcatttctctgtttgtttttgttaccttctcttgccactgtagcttattttaatatggtctatatgcctgctagttgggtgatgcgtattatgacatggttggatatggttgatactagtttgtctggttttaagctaaaagactgtgttatgtatgcatcagctgtagtgttactaatccttatgacagcaagaactgtgtatgatgatggtgctaggagagtgtggacacttatgaatgtcttgacactcgtttataaagtttattatggtaatgctttagatcaagccatttccatgtgggctcttataatctctgttacttctaactactcaggtgtagttacaactgtcatgtttttggccagaggtattgtttttatgtgtgttgagtattgccctattttcttcataactggtaatacacttcagtgtataatgctagtttattgtttcttaggctatttttgtacttgttactttggcctcttttgtttactcaaccgctactttagactgactcttggtgtttatgattacttagtttctacacaggagtttagatatatgaattcacagggactactcccacccaagaatagcatagatgccttcaaactcaacattaaattgttgggtgttggtggcaaaccttgtatcaaagtagccactgtacagtctaaaatgtcagatgtaaagtgcacatcagtagtcttactctcagttttgcaacaactcagagtagaatcatcatctaaattgtgggctcaatgtgtccagttacacaatgacattctcttagctaaagatactactgaagcctttgaaaaaatggtttcactactttctgttttgctttccatgcagggtgctgtagacataaacaagctttgtgaagaaatgctggacaacagggcaaccttacaagctatagcctcagagtttagttcccttccatcatatgcagcttttgctactgctcaagaagcttatgagcaggctgttgctaatggtgattctgaagttgttcttaaaaagttgaagaagtctttgaatgtggctaaatctgaatttgaccgtgatgcagccatgcaacgtaagttggaaaagatggctgatcaagctatgacccaaatgtataaacaggctagatctgaggacaagagggcaaaagttactagtgctatgcagacaatgcttttcactatgcttagaaagttggataatgatgcactcaacaacattatcaacaatgcaagagatggttgtgttcccttgaacataatacctcttacaacagcagccaaactaatggttgtcataccagactataacacatataaaaatacgtgtgatggtacaacatttacttatgcatcagcattgtgggaaatccaacaggttgtagatgcagatagtaaaattgttcaacttagtgaaattagtatggacaattcacctaatttagcatggcctcttattgtaacagctttaagggccaattctgctgtcaaattacagaataatgagcttagtcctgttgcactacgacagatgtcttgtgctgccggtactacacaaactgcttgcactgatgacaatgcgttagcttactacaacacaacaaagggaggtaggtttgtacttgcactgttatccgatttacaggatttgaaatgggctagattccctaagagtgatggaactggtactatctatacagaactggaaccaccttgtaggtttgttacagacacacctaaaggtcctaaagtgaagtatttatactttattaaaggattaaacaacctaaatagaggtatggtacttggtagtttagctgccacagtacgtctacaagctggtaatgcaacagaagtgcctgccaattcaactgtattatctttctgtgcttttgctgtagatgctgctaaagcttacaaagattatctagctagtgggggacaaccaatcactaattgtgttaagatgttgtgtacacacactggtactggtcaggcaataacagttacaccggaagccaatatggatcaagaatcctttggtggtgcatcgtgttgtctgtactgccgttgccacatagatcatccaaatcctaaaggattttgtgacttaaaaggtaagtatgtacaaatacctacaacttgtgctaatgaccctgtgggttttacacttaaaaacacagtctgtaccgtctgcggtatgtggaaaggttatggctgtagttgtgatcaactccgcgaacccatgcttcagtcagctgatgcacaatcgtttttaaacgggtttgcggtgtaagtgcagcccgtcttacaccgtgcggcacaggcactagtactgatgtcgtatacagggcttttgacatctacaatgataaagtagctggttttgctaaattcctaaaaactaattgttgtcgcttccaagaaaaggacgaagatgacaatttaattgattcttactttgtagttaagagacacactttctctaactaccaacatgaagaaacaatttataatttacttaaggattgtccagctgttgctaaacatgacttctttaagtttagaatagacggtgacatggtaccacatatatcacgtcaacgtcttactaaatacacaatggcagacctcgtctatgctttaaggcattttgatgaaggtaattgtgacacattaaaagaaatacttgtcacatacaattgttgtgatgatgattatttcaataaaaaggactggtatgattttgtagaaaacccagatatattacgcgtatacgccaacttaggtgaacgtgtacgccaagctttgttaaaaacagtacaattctgtgatgccatgcgaaatgctggtattgttggtgtactgacattagataatcaagatctcaatggtaactggtatgatttcggtgatttcatacaaaccacgccaggtagtggagttcctgttgtagattcttattattcattgttaatgcctatattaaccttgaccagggctttaactgcagagtcacatgttgacactgacttaacaaagccttacattaagtgggatttgttaaaatatgacttcacggaagagaggttaaaactctttgaccgttattttaaatattgggatcagacataccacccaaattgtgttaactgtttggatgacagatgcattctgcattgtgcaaactttaatgttttattctctacagtgttcccacttacaagttttggaccactagtgagaaaaatatttgttgatggtgttccatttgtagtttcaactggataccacttcagagagctaggtgttgtacataatcaggatgtaaatttacatagctctagacttagttttaaggaattacttgtgtatgctgctgaccctgctatgcacgctgcttctggtaatctattactagataaacgcactacgtgcttttcagtagctgcacttactaacaatgttgcttttcaaactgtcaaacccggtaattttaacaaagacttctatgactttgctgtgtctaagggtttctttaaggaaggaagttctgttgaattaaaacacttcttctttgctcaggatggtaatgctgctatcagcgattatgactactatcgttataatctaccaacaatgtgtgatatcagacaactactatttgtagttgaagttgttgataagtactttgattgttacgatggtggctgtattaatgctaaccaagtcatcgtcaacaacctagacaaatcagctggttttccatttaataaatggggtaaggctagactttattatgattcaatgagttatgaggatcaagatgcacttttcgcatatacaaaacgtaatgtcatccctactataactcaaatgaatcttaagtatgccattagtgcaaagaatagagctcgcaccgtagctggtgtctctatctgtagtactatgaccaatagacagtttcatcaaaaattattgaaatcaatagccgccactagaggagctactgtagtaattggaacaagcaaattctatggtggttggcacaacatgttaaaaactgtttatagtgatgtagaaaaccctcaccttatgggttgggattatcctaaatgtgatagagccatgcctaatatgcttagaattatggcctcacttgttcttgctcgcaaacatacaacgtgttgtagcttgtcacaccgtttctatagattagctaatgagtgtgctcaagtattgagtgaaatggtcatgtgtggcggttcactatatgttaaaccaggtggaacctcatcaggagatgccacaactgcttatgctaatagtgtttttaacatttgtcaagctgtcacggccaatgttaatgcacttttatctactgatggtaacaaaattgccgataagtatgtccgcaatttacaacacagactttatgagtgtctctatagaaatagagatgttgacacagactttgtgaatgagttttacgcatatttgcgtaaacatttctcaatgatgatactctctgacgatgctgttgtgtgtttcaatagcacttatgcatctcaaggtctagtggctagcataaagaactttaagtcagttctttattatcaaaacaatgtttttatgtctgaagcaaaatgttggactgagactgaccttactaaaggacctcatgaattttgctctcaacatacaatgctagttaaacagggtgatgattatgtgtaccttccttacccagatccatcaagaatcctaggggccggctgttttgtagatgatatcgtaaaaacagatggtacacttatgattgaacggttcgtgtctttagctatagatgcttacccacttactaaacatcctaatcaggagtatgctgatgtctttcatttgtacttacaatacataagaaagctacatgatgagttaacaggacacatgttagacatgtattctgttatgcttactaatgataacacttcaaggtattgggaacctgagttttatgaggctatgtacacaccgcatacagtcttacaggctgttggggcttgtgttctttgcaattcacagacttcattaagatgtggtgcttgcatacgtagaccattcttatgttgtaaatgctgttacgaccatgtcatatcaacatcacataaattagtcttgtctgttaatccgtatgtttgcaatgctccaggttgtgatgtcacagatgtgactcaactttacttaggaggtatgagctattattgtaaatcacataaaccacccattagttttccattgtgtgctaatggacaagtttttggtttatataaaaatacatgtgttggtagcgataatgttactgactttaatgcaattgcaacatgtgactggacaaatgctggtgattacattttagctaacacctgtactgaaagactcaagctttttgcagcagaaacgctcaaagctactgaggagacatttaaactgtcttatggtattgctactgtacgtgaagtgctgtctgacagagaattacatctttcatgggaagttggtaaacctagaccaccacttaaccgaaattatgtctttactggttatcgtgtaactaaaaacagtaaagtacaaataggagagtacacctttgaaaaaggtgactatggtgatgctgttgtttaccgaggtacaacaacttacaaattaaatgttggtgattattttgtgctgacatcacatacagtaatgccattaagtgcacctacactagtgccacaagagcactatgttagaattactggcttatacccaacactcaatatctcagatgagttttctagcaatgttgcaaattatcaaaaggttggtatgcaaaagtattctacactccagggaccacctggtactggtaagagtcattttgctattggcctagctctctactacccttctgctcgcatagtgtatacagcttgctctcatgccgctgttgatgcactatgtgagaaggcattaaaatatttgcctatagataaatgtagtagaattatacctgcacgtgctcgtgtagagtgttttgataaattcaaagtgaattcaacattagaacagtatgtcttttgtactgtaaatgcattgcctgagacgacagcagatatagttgtctttgatgaaatttcaatggccacaaattatgatttgagtgttgtcaatgccagattacgtgctaagcactatgtgtacattggcgaccctgctcaattacctgcaccacgcacattgctaactaagggcacactagaaccagaatatttcaattcagtgtgtagacttatgaaaactataggtccagacatgttcctcggaacttgtcggcgttgtcctgctgaaattgttgacactgtgagtgctttggtttatgataataagcttaaagcacataaagacaaatcagctcaatgctttaaaatgttttataagggtgttatcacgcatgatgtttcatctgcaattaacaggccacaaataggcgtggtaagagaattccttacacgtaaccctgcttggagaaaagctgtctttatttcaccttataattcacagaatgctgtagcctcaaagattttgggactaccaactcaaactgttgattcatcacagggctcagaatatgactatgtcatattcactcaaaccactgaaacagctcactcttgtaatgtaaacagatttaatgttgctattaccagagcaaaagtaggcatactttgcataatgtctgatagagacctttatgacaagttgcaatttacaagtcttgaaattccacgtaggaatgtggcaactttacaagctgaaaatgtaacaggactctttaaagattgtagtaaggtaatcactgggttacatcctacacaggcacctacacacctcagtgttgacactaaattcaaaactgaaggtttatgtgttgacatacctggcatacctaaggacatgacctatagaagactcatctctatgatgggttttaaaatgaattatcaagttaatggttaccctaacatgtttatcacccgcgaagaagctataagacatgtacgtgcatggattggcttcgatgtcgaggggtgtcatgctactagagaagctgttggtaccaatttacctttacagctaggtttttctacaggtgttaacctagttgctgtacctacaggttatgttgatacacctaataatacagatttttccagagttagtgctaaaccaccgcctggagatcaatttaaacacctcataccacttatgtacaaaggacttccttggaatgtagtgcgtataaagattgtacaaatgttaagtgacacacttaaaaatctctctgacagagtcgtatttgtcttatgggcacatggctttgagttgacatctatgaagtattttgtgaaaataggacctgagcgcacctgttgtctatgtgatagacgtgccacatgcttttccactgcttcagacacttatgcctgttggcatcattctattggatttgattacgtctataatccgtttatgattgatgttcaacaatggggttttacaggtaacctacaaagcaaccatgatctgtattgtcaagtccatggtaatgcacatgtagctagttgtgatgcaatcatgactaggtgtctagctgtccacgagtgctttgttaagcgtgttgactggactattgaatatcctataattggtgatgaactgaagattaatgcggcttgtagaaaggttcaacacatggttgttaaagctgcattattagcagacaaattcccagttcttcacgacattggtaaccctaaagctattaagtgtgtacctcaagctgatgtagaatggaagttctatgatgcacagccttgtagtgacaaagcttataaaatagaagaattattctattcttatgccacacattctgacaaattcacagatggtgtatgcctattttggaattgcaatgtcgatagatatcctgctaattccattgtttgtagatttgacactagagtgctatctaaccttaacttgcctggttgtgatggtggcagtttgtatgtaaataaacatgcattccacacaccagcttttgataaaagtgcttttgttaatttaaaacaattaccatttttctattactctgacagtccatgtgagtctcatggaaaacaagtagtgtcagatatagattatgtaccactaaagtctgctacgtgtataacacgttgcaatttaggtggtgctgtctgtagacatcatgctaatgagtacagattgtatctcgatgcttataacatgatgatctcagctggctttagcttgtgggtttacaaacaatttgatacttataacctctggaacacttttacaagacttcagagtttagaaaatgtggcttttaatgttgtaaataagggacactttgatggacaacagggtgaagtaccagtttctatcattaataacactgtttacacaaaagttgatggtgttgatgtagaattgtttgaaaataaaacaacattacctgttaatgtagcatttgagctttgggctaagcgcaacattaaaccagtaccagaggtgaaaatactcaataatttgggtgtggacattgctgctaatactgtgatctgggactacaaaagagatgctccagcacatatatctactattggtgtttgttctatgactgacatagccaagaaaccaactgaaacgatttgtgcaccactcactgtcttttttgatggtagagttgatggtcaagtagacttatttagaaatgcccgtaatggtgttcttattacagaaggtagtgttaaaggtttacaaccatctgtaggtcccaaacaagctagtcttaatggagtcacattaattggagaagccgtaaaaacacagttcaattattataagaaagttgatggtgttgtccaacaattacctgaaacttactttactcagagtagaaatttacaagaatttaaacccaggagtcaaatggaaattgatttcttagaattagctatggatgaattcattgaacggtataaattagaaggctatgccttcgaacatatcgtttatggagattttagtcatagtcagttaggtggtttacatctactgattggactagctaaacgttttaaggaatcaccttttgaattagaagattttattcctatggacagtacagttaaaaactatttcataacagatgcgcaaacaggttcatctaagtgtgtgtgttctgttattgatttattacttgatgattttgttgaaataataaaatcccaagatttatctgtagtttctaaggttgtcaaagtgactattgactatacagaaatttcatttatgctttggtgtaaagatggccatgtagaaacattttacccaaaattacaatctagtcaagcgtggcaaccgggtgttgctatgcctaatctttacaaaatgcaaagaatgctattagaaaagtgtgaccttcaaaattatggtgatagtgcaacattacctaaaggcataatgatgaatgtcgcaaaatatactcaactgtgtcaatatttaaacacattaacattagctgtaccctataatatgagagttatacattttggtgctggttctgataaaggagttgcaccaggtacagctgttttaagacagtggttgcctacgggtacgctgcttgtcgactcagatcttaatgactttgtctctgatgcagattcaactttgattggtgattgtgcaactgtacatacagctaataaatgggatctcattattagtgatatgtacgaccctaagactaaaaatgttacaaaagaaaatgactctaaagagggttttttcacttacatttgtgggtttatacaacaaaagctagctcttggaggttccgtggctataaagataacagaacattcttggaatgctgatctttataagctcatgggacacttcgcatggtggacagcctttgttactaatgtgaatgcgtcatcatctgaagcatttttaattggatgtaattatcttggcaaaccacgcgaacaaatagatggttatgtcatgcatgcaaattacatattttggaggaatacaaatccaattcagttgtcttcctattctttatttgacatgagtaaatttccccttaaattaaggggtactgctgttatgtctttaaaagaaggtcaaatcaatgatatgattttatctcttcttagtaaaggtagacttataattagagaaaacaacagagttgttatttctagtgatgttcttgttaacaactaaacgaacaatgtttgtttttcttgttttattgccactagtctctagtcagtgtgttaatcttacaaccagaactcaattaccccctgcatacactaattctttcacacgtggtgtttattaccctgacaaagttttcagatcctcagttttacattcaactcaggacttgttcttacctttcttttccaatgttacttggttccatgctatacatgtctctgggaccaatggtactaagaggtttgataaccctgtcctaccatttaatgatggtgtttattttgcttccactgagaagtctaacataataagaggctggatttttggtactactttagattcgaagacccagtccctacttattgttaataacgctactaatgttgttattaaagtctgtgaatttcaattttgtaatgatccatttttgggtgtttattaccacaaaaacaacaaaagttggatggaaagtgagttcagagtttattctagtgcgaataattgcacttttgaatatgtctctcagccttttcttatggaccttgaaggaaaacagggtaatttcaaaaatcttagggaatttgtgtttaagaatattgatggttattttaaaatatattctaagcacacgcctattaatttagtgcgtgatctccctcagggtttttcggctttagaaccattggtagatttgccaataggtattaacatcactaggtttcaaactttacttgctttacatagaagttatttgactcctggtgattcttcttcaggttggacagctggtgctgcagcttattatgtgggttatcttcaacctaggacttttctattaaaatataatgaaaatggaaccattacagatgctgtagactgtgcacttgaccctctctcagaaacaaagtgtacgttgaaatccttcactgtagaaaaaggaatctatcaaacttctaactttagagtccaaccaacagaatctattgttagatttcctaatattacaaacttgtgcccttttggtgaagtttttaacgccaccagatttgcatctgtttatgcttggaacaggaagagaatcagcaactgtgttgctgattattctgtcctatataattccgcatcattttccacttttaagtgttatggagtgtctcctactaaattaaatgatctctgctttactaatgtctatgcagattcatttgtaattagaggtgatgaagtcagacaaatcgctccagggcaaactggaaagattgctgattataattataaattaccagatgattttacaggctgcgttatagcttggaattctaacaatcttgattctaaggttggtggtaattataattacctgtatagattgtttaggaagtctaatctcaaaccttttgagagagatatttcaactgaaatctatcaggccggtagcacaccttgtaatggtgttgaaggttttaattgttactttcctttacaatcatatggtttccaacccactaatggtgttggttaccaaccatacagagtagtagtactttcttttgaacttctacatgcaccagcaactgtttgtggacctaaaaagtctactaatttggttaaaaacaaatgtgtcaatttcaacttcaatggtttaacaggcacaggtgttcttactgagtctaacaaaaagtttctgcctttccaacaatttggcagagacattgctgacactactgatgctgtccgtgatccacagacacttgagattcttgacattacaccatgttcttttggtggtgtcagtgttataacaccaggaacaaatacttctaaccaggttgctgttctttatcagggtgttaactgcacagaagtccctgttgctattcatgcagatcaacttactcctacttggcgtgtttattctacaggttctaatgtttttcaaacacgtgcaggctgtttaataggggctgaacatgtcaacaactcatatgagtgtgacatacccattggtgcaggtatatgcgctagttatcagactcagactaattctcctcggcgggcacgtagtgtagctagtcaatccatcattgcctacactatgtcacttggtgcagaaaattcagttgcttactctaataactctattgccatacccacaaattttactattagtgttaccacagaaattctaccagtgtctatgaccaagacatcagtagattgtacaatgtacatttgtggtgattcaactgaatgcagcaatcttttgttgcaatatggcagtttttgtacacaattaaaccgtgctttaactggaatagctgttgaacaagacaaaaacacccaagaagtttttgcacaagtcaaacaaatttacaaaacaccaccaattaaagattttggtggttttaatttttcacaaatattaccagatccatcaaaaccaagcaagaggtcatttattgaagatctacttttcaacaaagtgacacttgcagatgctggcttcatcaaacaatatggtgattgccttggtgatattgctgctagagacctcatttgtgcacaaaagtttaacggccttactgttttgccacctttgctcacagatgaaatgattgctcaatacacttctgcactgttagcgggtacaatcacttctggttggacctttggtgcaggtgctgcattacaaataccatttgctatgcaaatggcttataggtttaatggtattggagttacacagaatgttctctatgagaaccaaaaattgattgccaaccaatttaatagtgctattggcaaaattcaagactcactttcttccacagcaagtgcacttggaaaacttcaagatgtggtcaaccaaaatgcacaagctttaaacacgcttgttaaacaacttagctccaattttggtgcaatttcaagtgttttaaatgatatcctttcacgtcttgacaaagttgaggctgaagtgcaaattgataggttgatcacaggcagacttcaaagtttgcagacatatgtgactcaacaattaattagagctgcagaaatcagagcttctgctaatcttgctgctactaaaatgtcagagtgtgtacttggacaatcaaaaagagttgatttttgtggaaagggctatcatcttatgtccttccctcagtcagcacctcatggtgtagtcttcttgcatgtgacttatgtccctgcacaagaaaagaacttcacaactgctcctgccatttgtcatgatggaaaagcacactttcctcgtgaaggtgtctttgtttcaaatggcacacactggtttgtaacacaaaggaatttttatgaaccacaaatcattactacagacaacacatttgtgtctggtaactgtgatgttgtaataggaattgtcaacaacacagtttatgatcctttgcaacctgaattagactcattcaaggaggagttagataaatattttaagaatcatacatcaccagatgttgatttaggtgacatctctggcattaatgcttcagttgtaaacattcaaaaagaaattgaccgcctcaatgaggttgccaagaatttaaatgaatctctcatcgatctccaagaacttggaaagtatgagcagtatataaaatggccatggtacatttggctaggttttatagctggcttgattgccatagtaatggtgacaattatgctttgctgtatgaccagttgctgtagttgtctcaagggctgttgttcttgtggatcctgctgcaaatttgatgaagangactctgagccagtgctcaaaggagtcaaattacattacacataaacgaacttatggatttgtttatgagaatcttcacaattggaactgtaactttgaagcaaggtgaaatcaaggatgctactccttcagattttgttcgcgctactgcaacgataccgatacaagcctcactccctttcggatggcttattgttggcgttgcacttcttgctgtttttcagagcgcttccaaaatcataaccctcaaaaagagatggcaactagcactctccaagggtgttcactttgtttgcaacttgctgttgttgtttgtaacagtttactcacaccttttgctcgttgctgctggccttgaagccccttttctctatctttatgctttagtctacttcttgcagagtataaactttgtaagaataataatgaggctttggctttgctggaaatgccgttccaaaaacccattactttatgatgccaactattttctttgctggcatactaattgttacgactattgtataccttacaatagtgtaacttcttcaattgtcattacttcaggtgatggcacaacaagtcctatttctgaacatgactaccagattggtggttatactaaaaaatgggaatctggagtaaaagactgtgttgtattacacagttacttcacttcagactattaccagctgtactcaactcaattgagtacagacactggtgttgaacatgttaccttcttcatctacaataaaattgttgatgagcctgaagaacatgtccaaattcacacaatcgacggttcatccggagttgttaatccagtaatggaaccaatttatgatgaaccgacgacgactactagcgtgcctttgtaagcacaagctgatgagtacgaacttatgtactcattcgtttcggaagagacaggtacgttaatagttaatagcgtacttctttttcttgctttcgtggtattcttgctagttacactagccatccttactgcgcttcgattgtgtgcgtactgctgcaatattgttaacgtgagtcttgtaaaaccttctttttacgtttactctcgtgttaaaaatctgaattcttctagagttcctgatcttccggtctaaacgaactaaatattatattagtttttctgtttggaactttaattttagccatggcagattccaacggtactattaccgttgaagagcttaaaaagctccttgaacaatggaacctagtaataggtttcctattccttacatggatttgtcttctacaatttgcctatgccaacaggaataggtttttgtatataattaagttaattttcctctggctgttatggccagtaactttagcttgttttgtgcttgctgctgtttacagaataaattggatcaccggtggaattgctatcgcaatggcttgtcttgtaggcttgatgtggctcagctacttcattgcttctttcagactgtttgcgcgtacgcgttccatgtggtcattcaatccagaaactaacattcttctcaacgtgccactccatggcactattctgaccagaccgcttctagaaagtgaactcgtaatcggagctgtgatccttcgtggacatcttcgtattgctggacaccatctaggacgctgtgacatcaaggacctgcctaaagaaatcactgttgctacatcacgaacgctttcttattacaaattgggagcttcgcagcgtgtagcaggtgactcaggttttgctgcatacagtcgctacaggattggcaactataaattaaacacagaccattccagtagcagtgacaatattgctttgcttgtacagtaagtgacaacagatgtttcatctcgttgactttcaggttactatagcagagatattactaattattatgaggacttttaaagtttccatttggaatcttgattacatcataaacctcataattaaaaatttatctaagtcactaactgagaataaatattctcaattagatgaagagcaaccaatggagattgattaaacgaacatgaaaattattcttttcttggcactgataacactcgctacttgtgagctttatcactaccaagagtgtgttagaggtacaacagtacttttaaaagaaccttgctcttctggaacatacgagggcaattcaccatttcatcctctagctgataacaaatttgcactgacttgctttagcactcaatttgcttttgcttgtcctgacggcgtaaaacacgtctatcagttacgtgccagatcagtttcacctaaactgttcatcagacaagaggaagttcaagaactttactctccaatttttcttattgttgcggcaatagtgtttataacactttgcttcacactcaaaagaaagacagaatgattgaactttcattaattgacttctatttgtgctttttagcctttctgctattccttgttttaattatgcttattatcttttggttctcacttgaactgcaagatcataatgaaacttgtcacgcctaaacgaacatgaaatttcttgttttcttaggaatcatcacaactgtagctgcatttcaccaagaatgtagtttacagtcatgtactcaacatcaaccatatgtagttgatgacccgtgtcctattcacttctattctaaatggtatattagagtaggagctagaaaatcagcacctttaattgaattgtgcgtggatgaggctggttctaaatcacccattcagtacatcgatatcggtaattatacagtttcctgtttaccttttacaattaattgccaggaacctaaattgggtagtcttgtagtgcgttgttcgttctatgaagactttttagagtatcatgacgttcgtgttgttttagatttcatctaaacgaacaaactaaaatgtctgataatggaccccaaaatcagcgaaatgcaccccgcattacgtttggtggaccctcagattcaactggcagtaaccagaatggagaacgcagtggggcgcgatcaaaacaacgtcggccccaaggtttacccaataatactgcgtcttggttcaccgctctcactcaacatggcaaggaagaccttaaattccctcgaggacaaggcgttccaattaacaccaatagcagtccagatgaccaaattggctactaccgaagagctaccagacgaattcgtggtggtgacggtaaaatgaaagatctcagtccaagatggtatttctactacctaggaactgggccagaagctggacttccctatggtgctaacaaagacggcatcatatgggttgcaactgagggagccttgaatacaccaaaagatcacattggcacccgcaatcctgctaacaatgctgcaatcgtgctacaacttcctcaaggaacaacattgccaaaaggcttctacgcagaagggagcagaggcggcagtcaagcctcttctcgttcctcatcacgtagtcgcaacagttcaagaaattcaactccaggcagcagtaggggaacttctcctgctagaatggctggcaatggcggtgatgctgctcttgctttgctgctgcttgacagattgaaccagcttgagagcaaaatgtctggtaaaggccaacaacaacaaggccaaactgtcactaagaaatctgctgctgaggcttctaagaagcctcggcaaaaacgtactgccactaaagcatacaatgtaacacaagctttcggcagacgtggtccagaacaaacccaaggaaattttggggaccaggaactaatcagacaaggaactgattacaaacattggccgcaaattgcacaatttgcccccagcgcttcagcgttcttcggaatgtcgcgcattggcatggaagtcacaccttcgggaacgtggttgacctacacaggtgccatcaaattggatgacaaagatccaaatttcaaagatcaagtcattttgctgaataagcatattgacgcatacaaaacattcccaccaacagagcctaaaaaggacaaaaagaagaaggctgatgaaactcaagccttaccgcagagacagaagaaacagcaaactgtgactcttcttcctgctgcagatttggatgatttctccaaacaattgcaacaatccatgagcagtgctgactcaactcaggcctaaactcatgcagaccacacaaggcagatgggctatataaacgttttcgcttttccgtttacgatatatagtctactcttgtgcagaatgaattctcgtaactacatagcacaagtagatgtagttaactttaatctcacatagcaatctttaatcagtgtgtaacattagggaggacttgaaagagccaccacattttcaccgaggccacgcggagtacgatcgagtgtacagtgaacaatgctagggagagctgcctatatggaagagccctaatgtgtaaaattaattttagtagtgctatccccatgtg

SEQ ID NO: 56 - DNA, 29805 bp, synthetic construct
  misc_feature 1..29805: note = Reconstituted virus 19
  source 1..29805: mol_type = other DNA
actttcgatctcttgtagatctgttctctaaacgaactttaaaatctgtgtggctgtcactcggctgcatgcttagtgcactcacgcagtataattaataactaattactgtcgttgacaggacacgagtaactcgtctatcttctgcaggctgcttacggtttcgtccgtgttgcagccgatcatcagcacatctaggttttgtccgggtgtgaccgaaaggtaagatggagagccttgtccctggtttcaacgagaaaacacacgtccaactcagtttgcctgttttacaggttcgcgacgtgctcgtacgtggctttggagactccgtggaggaggtcttatcagaggcacgtcaacatcttaaagatggcacttgtggcttagtagaagttgaaaaaggcgttttgcctcaacttgaacagccctatgtgttcatcaaacgttcggatgctcgaactgcacctcatggtcatgttatggttgagctggtagcagaactcgaaggcattcagtacggtcgtagtggtgagacacttggtgtccttgtccctcatgtgggcgaaataccagtggcttaccgcaaggttcttcttcgtaagaacggtaataaaggagctggtggccatagttacggcgccgatctaaagtcatttgacttaggcgacgagcttggcactgatccttatgaagattttcaagaaaactggaacactaaacatagcagtggtgttacccgtgaactcatgcgtgagcttaacggaggggcatacactcgctatgtcgataacaacttctgtggccctgatggctaccctcttgagtgcattaaagaccttctagcacgtgctggtaaagcttcatgcactttgtccgaacaactggactttattgacactaagaggggtgtatactgctgccgtgaacatgagcatgaaattgcttggtacacggaacgttctgaaaagagctatgaattgcagacaccttttgaaattaaattggcaaagaaatttgacaccttcaatggggaatgtccaaattttgtatttcccttaaattccataatcaagactattcaaccaagggttgaaaagaaaaagcttgatggctttatgggtagaattcgatctgtctatccagttgcgtcaccaaatgaatgcaaccaaatgtgcctttcaactctcatgaagtgtgatcattgtggtgaaacttcatggcagacgggcgattttgttaaagccacttgcgaattttgtggcactgagaatttgactaaagaaggtgccactacttgtggttacttaccccaaaatgctgttgttaaaatttattgtccagcatgtcacaattcagaagtaggacctgagcatagtcttgccgaataccataatgaatctggcttgaaaaccattcttcgtaagggtggtcgcactattgcctttggaggctgtgtgttctcttatgttggttgccataacaagtgtgcctattgggttccacgtgctagcgctaacataggttgtaaccatacaggtgttgttggagaaggttccgaaggtcttaatgacaaccttcttgaaatactccaaaaagagaaagtcaacatcaatattgttggtgactttaaacttaatgaagagatcgccattattttggcatctttttctgcttccacaagtgcttttgtggaaactgtgaaaggtttggattataaagcattcaaacaaattgttgaatcctgtggtaattttaaagttacaaaaggaaaagctaaaaaaggtgcctggaatattggtgaacagaaatcaatactgagtcctctttatgcatttgcatcagaggctgctcgtgttgtacgatcaattttctcccgcactcttgaaactgctcaaaattctgtgcgtgttttacagaaggccgctataacaatactagatggaatttcacagtattcactgagactcattgatgctatgatgttcacatctgatttggctactaacaatctagttgtaatggcctacattacaggtggtgttgttcagttgacttcgcagtggctaactaacatctttggcactgtttatgaaaaactcaaacccgtccttgattggcttgaagagaagtttaaggaaggtgtagagtttcttagagacggttgggaaattgttaaatttatctcaacctgtgcttgtgaaattgtcggtggacaaattgtcacctgtgcaaaggaaattaaggagagtgttcagacattctttaagcttgtaaataaatttttggctttgtgtgctgactctatcattattggtggagctaaacttaaagccttgaatttaggtgaaacatttgtcacgcactcaaagggattgtacagaaagtgtgttaaatccagagaagaaactggcctactcatgcctctaaaagccccaaaagaaattatcttcttagagggagaaacacttcccacagaagtgttaacagaggaagttgtcttgaaaactggtgatttacaaccattagaacaacctactagtgaagctgttgaagctccattggttggtacaccagtttgtattaacgggcttatgttgctcgaaatcaaagacacagaaaagtactgtgcccttgcacctaatatgatggtaacaaacaataccttcacactcaaaggcggtgcaccaacaaaggttacttttggtgatgacactgtgatagaagtgcaaggttacaagagtgtgaatatcacttttgaacttgatgaaaggattgataaagtacttaatgagaagtgctctgcctatacagttgaactcggtacagaagtaaatgagttcgcctgtgttgtggcagatgctgtcataaaaactttgcaaccagtatctgaattacttacaccactgggcattgatttagatgagtggagtatggctacatactacttatttgatgagtctggtgagtttaaattggcttcacatatgtattgttctttttaccctccagatgaggatgaagaagaaggtgattgtgaagaagaagagtttgagccatcaactcaatatgagtatggtactgaagatgattaccaaggtaaacctttggaatttggtgccacttctgctgctcttcaacctgaagaagagcaagaagaagattggttagatgatgatagtcaacaaactgttggtcaacaagacggcagtgaggacaatcagacaactactattcaaacaattgttgaggttcaacctcaattagagatggaacttacaccagttgttcagactattgaagtgaatagttttagtggttatttaaaacttactgacaatgtatacattaaaaatgcagacattgtggaagaagctaaaaaggtaaaaccaacagtggttgttaatgcagccaatgtttaccttaaacatggaggaggtgttgcaggagccttaaataaggctactaacaatgccatgcaagttgaatctgatgattacatagctactaatggaccacttaaagtgggtggtagttgtgttttaagcggacacaatcttgctaaacactgtcttcatgttgtcggcccaaatgttaacaaaggtgaagacattcaacttcttaagagtgcttatgaaaattttaatcagcacgaagttctacttgcaccattattatcagctggtatttttggtgctgaccctatacattctttaagagtttgtgtagatactgttcgcacaaatgtctacttagctgtctttgataaaaatctctatgacaaacttgtttcaagctttttggaaatgaagagtgaaaagcaagttgaacaaaagatcgctgagattcctaaagaggaagttaagccatttataactgaaagtaaaccttcagttgaacagagaaaacaagatgataagaaaatcaaagcttgtgttgaagaagttacaacaactctggaagaaactaagttcctcacagaaaacttgttactttatattgacattaatggcaatcttcatccagattctgccactcttgttagtgacattgacatcactttcttaaagaaagatgctccatatatagtgggtgatgttgttcaagagggtgttttaactgctgtggttatacctactaaaaaggctggtggcactactgaaatgctagcgaaagctttgagaaaagtgccaacagacaattatataaccacttacccgggtcagggtttaaatggttacactgtagaggaggcaaagacagtgcttaaaaagtgtaaaagtgccttttacattctaccatctattatctctaatgagaagcaagaaattcttggaactgtttcttggaatttgcgagaaatgcttgcacatgcagaagaaacacgcaaattaatgcctgtctgtgtggaaactaaagccatagtttcaactatacagcgtaaatataagggtattaaaatacaagagggtgtggttgattatggtgctagattttacttttacaccagtaaaacaactgtagcgtcacttatcaacacacttaacgatctaaatgaaactcttgttacaatgccacttggctatgtaacacatggcttaaatttggaagaagctgctcggtatatgagatctctcaaagtgccagctacagtttctgtttcttcacctgatgctgttacagcgtataatggttatcttacttcttcttctaaaacacctgaagaacattttattgaaaccatctcacttgctggttcctataaagattggtcctattctggacaatctacacaactaggtatagaatttcttaagagaggtgataaaagtgtatattacactagtaatcctaccacattccacctagatggtgaagttatcacctttgacaatcttaagacacttctttctttgagagaagtgaggactattaaggtgtttacaacagtagacaacattaacctccacacgcaagttgtggacatgtcaatgacatatggacaacagtttggtccaacttatttggatggagctgatgttactaaaataaaacctcataattcacatgaaggtaaaacattttatgttttacctaatgatgacactctacgtgttgaggcttttgagtactaccacacaactgatcctagttttctgggtaggtacatgtcagcattaaatcacactaaaaagtggaaatacccacaagttaatggtttaacttctattaaatgggcagataacaactgttatcttgccactgcattgttaacactccaacaaatagagttgaagtttaatccacctgctctacaagatgcttattacagagcaagggctggtgaagctgctaacttttgtgcacttatcttagcctactgtaataagacagtaggtgagttaggtgatgttagagaaacaatgagttacttgtttcaacatgccaatttagattcttgcaaaagagtcttgaacgtggtgtgtaaaacttgtggacaacagcagacaacccttaagggtgtagaagctgttatgtacatgggcacactttcttatgaacaatttaagaaaggtgttcagataccttgtacgtgtggtaaacaagctacaaaatatctagtacaacaggagtcaccttttgttatgatgtcagcaccacctgctcagtatgaacttaagcatggtacatttacttgtgctagtgagtacactggtaattaccagtgtggtcactataaacatataacttctaaagaaactttgtattgcatagacggtgctttacttacaaagtcctcagaatacaaaggtcctattacggatgttttctacaaagaaaacagttacacaacaaccataaaaccagttacttataaattggatggtgttgtttgtacagaaattgaccctaagttggacaattattataagaaagacaattcttatttcacagagcaaccaattgatcttgtaccaaaccaaccatatccaaacgcaagcttcgataattttaagtttgtatgtgataatatcaaatttgctgatgatttaaaccagttaactggttataagaaacctgcttcaagagagcttaaagttacatttttccctgacttaaatggtgatgtggtggctattgattataaacactacacaccctcttttaagaaaggagctaaattgttacataaacctattgtttggcatgttaacaatgcaactaataaagccacgtataaaccaaatacctggtgtatacgttgtctttggagcacaaaaccagttgaaacatcaaattcgtttgatgtactgaagtcagaggacgcgcagggaatggataatcttgcctgcgaagatctaaaaccagtctctgaagaagtagtggaaaatcctaccatacagaaagacgttcttgagtgtaatgtgaaaactaccgaagttgtaggagacattatacttaaaccagcaaataatagtttaaaaattacagaagaggttggccacacagatctaatggctgcttatgtagacaattctagtcttactattaagaaacctaatgaattatctagagtattaggtttgaaaacccttgctactcatggtttagctgctgttaatagtgtcccttgggatactatagctaattatgctaagccttttcttaacaaagttgttagtacaactactaacatagttacacggtgtttaaaccgtgtttgtactaattatatgccttatttctttactttattgctacaattgtgtacttttactagaagtacaaattctagaattaaagcatctatgccgactactatagcaaagaatactgttaagagtgtcggtaaattttgtctagaggcttcatttaattatttgaagtcacctaatttttctaaactgataaatattataatttggtttttactattaagtgtttgcctaggttctttaatctactcaaccgctgctttaggtgttttaatgtctaatttaggcatgccttcttactgtactggttacagagaaggctatttgaactctactaatgtcactattgcaacctactgtactggttctataccttgtagtgtttgtcttagtggtttagattctttagacacctatccttctttagaaactatacaaattaccatttcatcttttaaatgggatttaactgcttttggcttagttgcagagtggtttttggcatatattcttttcactaggtttttctatgtacttggattggctgcaatcatgcaattgtttttcagctattttgcagtacattttattagtaattcttggcttatgtggttaataattaatcttgtacaaatggccccgatttcagctatggttagaatgtacatcttctttgcatcattttattatgtatggaaaagttatgtgcatgttgtagacggttgtaattcatcaacttgtatgatgtgttacaaacgtaatagagcaacaagagtcgaatgtacaactattgttaatggtgttagaaggtccttttatgtctatgctaatggaggtaaaggcttttgcaaactacacaattggaattgtgttaattgtgatacattctgtgctggtagtacatttattagtgatgaagttgcgagagacttgtcactacagtttaaaagaccaataaatcctactgaccagtcttcttacatcgttgatagtgttacagtgaagaatggttccatccatctttactttgataaagctggtcaaaagacttatgaaagacattctctctctcattttgttaacttagacaacctgagagctaataacactaaaggttcattgcctattaatgttatagtttttgatggtaaatcaaaatgtgaagaatcatctgcaaaatcagcgtctgtttactacagtcagcttatgtgtcaacctatactgttactagatcaggcattagtgtctgatgttggtgatagtgcggaagttgcagttaaaatgtttgatgcttacgttaatacgttttcatcaacttttaacgtaccaatggaaaaactcaaaacactagttgcaactgcagaagctgaacttgcaaagaatgtgtccttagacaatgtcttatctacttttatttcagcagctcggcaagggtttgttgattcagatgtagaaactaaagatgttgttgaatgtcttaaattgtcacatcaatctgacatagaagttactggcgatagttgtaataactatatgctcacctataacaaagttgaaaacatgacaccccgtgaccttggtgcttgtattgactgtagtgcgcgtcatattaatgcgcaggtagcaaaaagtcacaacattgctttgatatggaacgttaaagatttcatgtcattgtctgaacaactacgaaaacaaatacgtagtgctgctaaaaagaataacttaccttttaagttgacatgtgcaactactagacaagttgttaatgttgtaacaacaaagatagcacttaagggtggtaaaattgttaataattggttgaagcagttaattaaagttacacttgtgttcctttttgttgctgctattttctatttaataacacctgttcatgtcatgtctaaacatactgacttttcaagtgaaatcataggatacaaggctattgatggtggtgtcactcgtgacatagcatctacagatacttgttttgctaacaaacatgctgattttgacacatggtttagccagcgtggtggtagttatactaatgacaaagcttgcccattgattgctgcagtcataacaagagaagtgggttttgtcgtgcctggtttgcctggcacgatattacgcacaactaatggtgactttttgcatttcttacctagagtttttagtgcagttggtaacatctgttacacaccatcaaaacttatagagtacactgactttgcaacatcagcttgtgttttggctgctgaatgtacaatttttaaagatgcttctggtaagccagtaccatattgttatgataccaatgtactagaaggttctgttgcttatgaaagtttacgccctgacacacgttatgtgctcatggatggctctattattcaatttcctaacacctaccttgaaggttctgttagagtggtaacaacttttgattctgagtactgtaggcacggcacttgtgaaagatcagaagctggtgtttgtgtatctactagtggtagatgggtacttaacaatgattattacagatctttaccaggagttttctgtggtgtagatgctgtaaatttacttactaatatgtttacaccactaattcaacctattggtgctttggacatatcagcatctatagtagctggtggtattgtagctatcgtagtaacatgccttgcctactattttatgaggtttagaagagcttttggtgaatacagtcatgtagttgcctttaatactttactattccttatgtcattcactgtactctgtttaacaccagtttactcattcttacctggtgtttattctgttatttacttgtacttgacattttatcttactaatgatgtttcttttttagcacatattcagtggatggttatgttcacacctttagtacctttctggataacaattgcttatatcatttgtatttccacaaagcatttctattggttctttagtaattacctaaagagacgtgtagtctttaatggtgtttcctttagtacttttgaagaagctgcgctgtgcacctttttgttaaataaagaaatgtatctaaagttgcgtagtgatgtgctattacctcttacgcaatataatagatacttagctctttataataagtacaagtattttagtggagcaatggatacaactagctacagagaagctgcttgttgtcatctcgcaaaggctctcaatgacttcagtaactcaggttctgatgttctttaccaaccaccacaaacctctatcacctcagctgttttgcagagtggttttagaaaaatggcattcccatctggtaaagttgagggttgtatggtacaagtaacttgtggtacaactacacttaacggtctttggcttgatgacgtagtttactgtccaagacatgtgatctgcacctctgaagacatgcttaaccctaattatgaagatttactcattcgtaagtctaatcataatttcttggtacaggctggtaatgttcaactcagggttattggacattctatgcaaaattgtgtacttaagcttaaggttgatacagccaatcctaagacacctaagtataagtttgttcgcattcaaccaggacagactttttcagtgttagcttgttacaatggttcaccatctggtgtttaccaatgtgctatgaggcccaatttcactattaagggttcattccttaatggttcatgtggtagtgttggttttaacatagattatgactgtgtctctttttgttacatgcaccatatggaattaccaactggagttcatgctggcacagacttagaaggtaacttttatggaccttttgttgacaggcaaacagcacaagcagctggtacggacacaactattacagttaatgttttagcttggttgtacgctgctgttataaatggagacaggtggtttctcaatcgatttaccacaactcttaatgactttaaccttgtggctatgaagtacaattatgaacctctaacacaagaccatgttgacatactaggacctctttctgctcaaactggaattgccgttttagatatgtgtgcttcattaaaagaattactgcaaaatggtatgaatggacgtaccatattgggtagtgctttattagaagatgaatttacaccttttgatgttgttagacaatgctcaggtgttactttccaaagtgcagtgaaaagaacaatcaagggtacacaccactggttgttactcacaattttgacttcacttttagttttagtccagagtactcaatggtctttgttcttttttttgtatgaaaatgcctttttaccttttgctatgggtattattgctatgtctgcttttgcaatgatgtttgtcaaacataagcatgcatttctctgtttgtttttgttaccttctcttgccactgtagcttattttaatatggtctatatgcctgctagttgggtgatgcgtattatgacatggttggatatggttgatactagtttgtctggttttaagctaaaagactgtgttatgtatgcatcagctgtagtgttactaatccttatgacagcaagaactgtgtatgatgatggtgctaggagagtgtggacacttatgaatgtcttgacactcgtttataaagtttattatggtaatgctttagatcaagccatttccatgtgggctcttataatctctgttacttctaactactcaggtgtagttacaactgtcatgtttttggccagaggtattgtttttatgtgtgttgagtattgccctattttcttcataactggtaatacacttcagtgtataatgctagtttattgtttcttaggctatttttgtacttgttactttggcctcttttgtttactcaaccgctactttagactgactcttggtgtttatgattacttagtttctacacaggagtttagatatatgaattcacagggactactcccacccaagaatagcatagatgccttcaaactcaacattaaattgttgggtgttggtggcaaaccttgtatcaaagtagccactgtacagtctaaaatgtcagatgtaaagtgcacatcagtagtcttactctcagttttgcaacaactcagagtagaatcatcatctaaattgtgggctcaatgtgtccagttacacaatgacattctcttagctaaagatactactgaagcctttgaaaaaatggtttcactactttctgttttgctttccatgcagggtgctgtagacataaacaagctttgtgaagaaatgctggacaacagggcaaccttacaagctatagcctcagagtttagttcccttccatcatatgcagcttttgctactgctcaagaagcttatgagcaggctgttgctaatggtgattctgaagttgttcttaaaaagttgaagaagtctttgaatgtggctaaatctgaatttgaccgtgatgcagccatgcaacgtaagttggaaaagatggctgatcaagctatgacccaaatgtataaacaggctagatctgaggacaagagggcaaaagttactagtgctatgcagacaatgcttttcactatgcttagaaagttggataatgatgcactcaacaacattatcaacaatgcaagagatggttgtgttcccttgaacataatacctcttacaacagcagccaaactaatggttgtcataccagactataacacatataaaaatacgtgtgatggtacaacatttacttatgcatcagcattgtgggaaatccaacaggttgtagatgcagatagtaaaattgttcaacttagtgaaattagtatggacaattcacctaatttagcatggcctcttattgtaacagctttaagggccaattctgctgtcaaattacagaataatgagcttagtcctgttgcactacgacagatgtcttgtgctgccggtactacacaaactgcttgcactgatgacaatgcgttagcttactacaacacaacaaagggaggtaggtttgtacttgcactgttatccgatttacaggatttgaaatgggctagattccctaagagtgatggaactggtactatctatacagaactggaaccaccttgtaggtttgttacagacacacctaaaggtcctaaagtgaagtatttatactttattaaaggattaaacaacctaaatagaggtatggtacttggtagtttagctgccacagtacgtctacaagctggtaatgcaacagaagtgcctgccaattcaactgtattatctttctgtgcttttgctgtagatgctgctaaagcttacaaagattatctagctagtgggggacaaccaatcactaattgtgttaagatgttgtgtacacacactggtactggtcaggcaataacagttacaccggaagccaatatggatcaagaatcctttggtggtgcatcgtgttgtctgtactgccgttgccacatagatcatccaaatcctaaaggattttgtgacttaaaaggtaagtatgtacaaatacctacaacttgtgctaatgaccctgtgggttttacacttaaaaacacagtctgtaccgtctgcggtatgtggaaaggttatggctgtagttgtgatcaactccgcgaacccatgcttcagtcagctgatgcacaatcgtttttaaacgggtttgcggtgtaagtgcagcccgtcttacaccgtgcggcacaggcactagtactgatgtcgtatacagggcttttgacatctacaatgataaagtagctggttttgctaaattcctaaaaactaattgttgtcgcttccaagaaaaggacgaagatgacaatttaattgattcttactttgtagttaagagacacactttctctaactaccaacatgaagaaacaatttataatttacttaaggattgtccagctgttgctaaacatgacttctttaagtttagaatagacggtgacatggtaccacatatatcacgtcaacgtcttactaaatacacaatggcagacctcgtctatgctttaaggcattttgatgaaggtaattgtgacacattaaaagaaatacttgtcacatacaattgttgtgatgatgattatttcaataaaaaggactggtatgattttgtagaaaacccagatatattacgcgtatacgccaacttaggtgaacgtgtacgccaagctttgttaaaaacagtacaattctgtgatgccatgcgaaatgctggtattgttggtgtactgacattagataatcaagatctcaatggtaactggtatgatttcggtgatttcatacaaaccacgccaggtagtggagttcctgttgtagattcttattattcattgttaatgcctatattaaccttgaccagggctttaactgcagagtcacatgttgacactgacttaacaaagccttacattaagtgggatttgttaaaatatgacttcacggaagagaggttaaaactctttgaccgttattttaaatattgggatcagacataccacccaaattgtgttaactgtttggatgacagatgcattctgcattgtgcaaactttaatgttttattctctacagtgttcccacttacaagttttggaccactagtgagaaaaatatttgttgatggtgttccatttgtagtttcaactggataccacttcagagagctaggtgttgtacataatcaggatgtaaatttacatagctctagacttagttttaaggaattacttgtgtatgctgctgaccctgctatgcacgctgcttctggtaatctattactagataaacgcactacgtgcttttcagtagctgcacttactaacaatgttgcttttcaaactgtcaaacccggtaattttaacaaagacttctatgactttgctgtgtctaagggtttctttaaggaaggaagttctgttgaattaaaacacttcttctttgctcaggatggtaatgctgctatcagcgattatgactactatcgttataatctaccaacaatgtgtgatatcagacaactactatttgtagttgaagttgttgataagtactttgattgttacgatggtggctgtattaatgctaaccaagtcatcgtcaacaacctagacaaatcagctggttttccatttaataaatggggtaaggctagactttattatgattcaatgagttatgaggatcaagatgcacttttcgcatatacaaaacgtaatgtcatccctactataactcaaatgaatcttaagtatgccattagtgcaaagaatagagctcgcaccgtagctggtgtctctatctgtagtactatgaccaatagacagtttcatcaaaaattattgaaatcaatagccgccactagaggagctactgtagtaattggaacaagcaaattctatggtggttggcacaacatgttaaaaactgtttatagtgatgtagaaaaccctcaccttatgggttgggattatcctaaatgtgatagagccatgcctaatatgcttagaattatggcctcacttgttcttgctcgcaaacatacaacgtgttgtagcttgtcacaccgtttctatagattagctaatgagtgtgctcaagtattgagtgaaatggtcatgtgtggcggttcactatatgttaaaccaggtggaacctcatcaggagatgccacaactgcttatgctaatagtgtttttaacatttgtcaagctgtcacggccaatgttaatgcacttttatctactgatggtaacaaaattgccgataagtatgtccgcaatttacaacacagactttatgagtgtctctatagaaatagagatgttgacacagactttgtgaatgagttttacgcatatttgcgtaaacatttctcaatgatgatactctctgacgatgctgttgtgtgtttcaatagcacttatgcatctcaaggtctagtggctagcataaagaactttaagtcagttctttattatcaaaacaatgtttttatgtctgaagcaaaatgttggactgagactgaccttactaaaggacctcatgaattttgctctcaacatacaatgctagttaaacagggtgatgattatgtgtaccttccttacccagatccatcaagaatcctaggggccggctgttttgtagatgatatcgtaaaaacagatggtacacttatgattgaacggttcgtgtctttagctatagatgcttacccacttactaaacatcctaatcaggagtatgctgatgtctttcatttgtacttacaatacataagaaagctacatgatgagttaacaggacacatgttagacatgtattctgttatgcttactaatgataacacttcaaggtattgggaacctgagttttatgaggctatgtacacaccgcatacagtcttacaggctgttggggcttgtgttctttgcaattcacagacttcattaagatgtggtgcttgcatacgtagaccattcttatgttgtaaatgctgttacgaccatgtcatatcaacatcacataaattagtcttgtctgttaatccgtatgtttgcaatgctccaggttgtgatgtcacagatgtgactcaactttacttaggaggtatgagctattattgtaaatcacataaaccacccattagttttccattgtgtgctaatggacaagtttttggtttatataaaaatacatgtgttggtagcgataatgttactgactttaatgcaattgcaacatgtgactggacaaatgctggtgattacattttagctaacacctgtactgaaagactcaagctttttgcagcagaaacgctcaaagctactgaggagacatttaaactgtcttatggtattgctactgtacgtgaagtgctgtctgacagagaattacatctttcatgggaagttggtaaacctagaccaccacttaaccgaaattatgtctttactggttatcgtgtaactaaaaacagtaaagtacaaataggagagtacacctttgaaaaaggtgactatggtgatgctgttgtttaccgaggtacaacaacttacaaattaaatgttggtgattattttgtgctgacatcacatacagtaatgccattaagtgcacctacactagtgccacaagagcactatgttagaattactggcttatacccaacactcaatatctcagatgagttttctagcaatgttgcaaattatcaaaaggttggtatgcaaaagtattctacactccagggaccacctggtactggtaagagtcattttgctattggcctagctctctactacccttctgctcgcatagtgtatacagcttgctctcatgccgctgttgatgcactatgtgagaaggcattaaaatatttgcctatagataaatgtagtagaattatacctgcacgtgctcgtgtagagtgttttgataaattcaaagtgaattcaacattagaacagtatgtcttttgtactgtaaatgcattgcctgagacgacagcagatatagttgtctttgatgaaatttcaatggccacaaattatgatttgagtgttgtcaatgccagattacgtgctaagcactatgtgtacattggcgaccctgctcaattacctgcaccacgcacattgctaactaagggcacactagaaccagaatatttcaattcagtgtgtagacttatgaaaactataggtccagacatgttcctcggaacttgtcggcgttgtcctgctgaaattgttgacactgtgagtgctttggtttatgataataagcttaaagcacataaagacaaatcagctcaatgctttaaaatgttttataagggtgttatcacgcatgatgtttcatctgcaattaacaggccacaaataggcgtggtaagagaattccttacacgtaaccctgcttggagaaaagctgtctttatttcaccttataattcacagaatgctgtagcctcaaagattttgggactaccaactcaaactgttgattcatcacagggctcagaatatgactatgtcatattcactcaaaccactgaaacagctcactcttgtaatgtaaacagatttaatgttgctattaccagagcaaaagtaggcatactttgcataatgtctgatagagacctttatgacaagttgcaatttacaagtcttgaaattccacgtaggaatgtggcaactttacaagctgaaaatgtaacaggactctttaaagattgtagtaaggtaatcactgggttacatcctacacaggcacctacacacctcagtgttgacactaaattcaaaactgaaggtttatgtgttgacatacctggcatacctaaggacatgacctatagaagactcatctctatgatgggttttaaaatgaattatcaagttaatggttaccctaacatgtttatcacccgcgaagaagctataagacatgtacgtgcatggattggcttcgatgtcgaggggtgtcatgctactagagaagctgttggtaccaatttacctttacagctaggtttttctacaggtgttaacctagttgctgtacctacaggttatgttgatacacctaataatacagatttttccagagttagtgctaaaccaccgcctggagatcaatttaaacacctcataccacttatgtacaaaggacttccttggaatgtagtgcgtataaagattgtacaaatgttaagtgacacacttaaaaatctctctgacagagtcgtatttgtcttatgggcacatggctttgagttgacatctatgaagtattttgtgaaaataggacctgagcgcacctgttgtctatgtgatagacgtgccacatgcttttccactgcttcagacacttatgcctgttggcatcattctattggatttgattacgtctataatccgtttatgattgatgttcaacaatggggttttacaggtaacctacaaagcaaccatgatctgtattgtcaagtccatggtaatgcacatgtagctagttgtgatgcaatcatgactaggtgtctagctgtccacgagtgctttgttaagcgtgttgactggactattgaatatcctataattggtgatgaactgaagattaatgcggcttgtagaaaggttcaacacatggttgttaaagctgcattattagcagacaaattcccagttcttcacgacattggtaaccctaaagctattaagtgtgtacctcaagctgatgtagaatggaagttctatgatgcacagccttgtagtgacaaagcttataaaatagaagaattattctattcttatgccacacattctgacaaattcacagatggtgtatgcctattttggaattgcaatgtcgatagatatcctgctaattccattgtttgtagatttgacactagagtgctatctaaccttaacttgcctggttgtgatggtggcagtttgtatgtaaataaacatgcattccacacaccagcttttgataaaagtgcttttgttaatttaaaacaattaccatttttctattactctgacagtccatgtgagtctcatggaaaacaagtagtgtcagatatagattatgtaccactaaagtctgctacgtgtataacacgttgcaatttaggtggtgctgtctgtagacatcatgctaatgagtacagattgtatctcgatgcttataacatgatgatctcagctggctttagcttgtgggtttacaaacaatttgatacttataacctctggaacacttttacaagacttcagagtttagaaaatgtggcttttaatgttgtaaataagggacactttgatggacaacagggtgaagtaccagtttctatcattaataacactgtttacacaaaagttgatggtgttgatgtagaattgtttgaaaataaaacaacattacctgttaatgtagcatttgagctttgggctaagcgcaacattaaaccagtaccagaggtgaaaatactcaataatttgggtgtggacattgctgctaatactgtgatctgggactacaaaagagatgctccagcacatatatctactattggtgtttgttctatgactgacatagccaagaaaccaactgaaacgatttgtgcaccactcactgtcttttttgatggtagagttgatggtcaagtagacttatttagaaatgcccgtaatggtgttcttattacagaaggtagtgttaaaggtttacaaccatctgtaggtcccaaacaagctagtcttaatggagtcacattaattggagaagccgtaaaaacacagttcaattattataagaaagttgatggtgttgtccaacaattacctgaaacttactttactcagagtagaaatttacaagaatttaaacccaggagtcaaatggaaattgatttcttagaattagctatggatgaattcattgaacggtataaattagaaggctatgccttcgaacatatcgtttatggagattttagtcatagtcagttaggtggtttacatctactgattggactagctaaacgttttaaggaatcaccttttgaattagaagattttattcctatggacagtacagttaaaaactatttcataacagatgcgcaaacaggttcatctaagtgtgtgtgttctgttattgatttattacttgatgattttgttgaaataataaaatcccaagatttatctgtagtttctaaggttgtcaaagtgactattgactatacagaaatttcatttatgctttggtgtaaagatggccatgtagaaacattttacccaaaattacaatctagtcaagcgtggcaaccgggtgttgctatgcctaatctttacaaaatgcaaagaatgctattagaaaagtgtgaccttcaaaattatggtgatagtgcaacattacctaaaggcataatgatgaatgtcgcaaaatatactcaactgtgtcaatatttaaacacattaacattagctgtaccctataatatgagagttatacattttggtgctggttctgataaaggagttgcaccaggtacagctgttttaagacagtggttgcctacgggtacgctgcttgtcgactcagatcttaatgactttgtctctgatgcagattcaactttgattggtgattgtgcaactgtacatacagctaataaatgggatctcattattagtgatatgtacgaccctaagactaaaaatgttacaaaagaaaatgactctaaagagggttttttcacttacatttgtgggtttatacaacaaaagctagctcttggaggttccgtggctataaagataacagaacattcttggaatgctgatctttataagctcatgggacacttcgcatggtggacagcctttgttactaatgtgaatgcgtcatcatctgaagcatttttaattggatgtaattatcttggcaaaccacgcgaacaaatagatggttatgtcatgcatgcaaattacatattttggaggaatacaaatccaattcagttgtcttcctattctttatttgacatgagtaaatttccccttaaattaaggggtactgctgttatgtctttaaaagaaggtcaaatcaatgatatgattttatctcttcttagtaaaggtagacttataattagagaaaacaacagagttgttatttctagtgatgttcttgttaacaactaaacgaacaatgtttgtttttcttgttttattgccactagtctctagtcagtgtgttaatcttacaaccagaactcaattaccccctgcatacactaattctttcacacgtggtgtttattaccctgacaaagttttcagatcctcagttttacattcaactcaggacttgttcttacctttcttttccaatgttacttggttccatgctatacatgtctctgggaccaatggtactaagaggtttgataaccctgtcctaccatttaatgatggtgtttattttgcttccactgagaagtctaacataataagaggctggatttttggtactactttagattcgaagacccagtccctacttattgttaataacgctactaatgttgttattaaagtctgtgaatttcaattttgtaatgatccatttttgggtgtttattaccacaaaaacaacaaaagttggatggaaagtgagttcagagtttattctagtgcgaataattgcacttttgaatatgtctctcagccttttcttatggaccttgaaggaaaacagggtaatttcaaaaatcttagggaatttgtgtttaagaatattgatggttattttaaaatatattctaagcacacgcctattaatttagtgcgtgatctccctcagggtttttcggctttagaaccattggtagatttgccaataggtattaacatcactaggtttcaaactttacttgctttacatagaagttatttgactcctggtgattcttcttcaggttggacagctggtgctgcagcttattatgtgggttatcttcaacctaggacttttctattaaaatataatgaaaatggaaccattacagatgctgtagactgtgcacttgaccctctctcagaaacaaagtgtacgttgaaatccttcactgtagaaaaaggaatctatcaaacttctaactttagagtccaaccaacagaatctattgttagatttcctaatattacaaacttgtgcccttttggtgaagtttttaacgccaccagatttgcatctgtttatgcttggaacaggaagagaatcagcaactgtgttgctgattattctgtcctatataattccgcatcattttccacttttaagtgttatggagtgtctcctactaaattaaatgatctctgctttactaatgtctatgcagattcatttgtaattagaggtgatgaagtcagacaaatcgctccagggcaaactggaaagattgctgattataattataaattaccagatgattttacaggctgcgttatagcttggaattctaacaatcttgattctaaggttggtggtaattataattacctgtatagattgtttaggaagtctaatctcaaaccttttgagagagatatttcaactgaaatctatcaggccggtagcacaccttgtaatggtgttgaaggttttaattgttactttcctttacaatcatatggtttccaacccactaatggtgttggttaccaaccatacagagtagtagtactttcttttgaacttctacatgcaccagcaactgtttgtggacctaaaaagtctactaatttggttaaaaacaaatgtgtcaatttcaacttcaatggtttaacaggcacaggtgttcttactgagtctaacaaaaagtttctgcctttccaacaatttggcagagacattgctgacactactgatgctgtccgtgatccacagacacttgagattcttgacattacaccatgttcttttggtggtgtcagtgttataacaccaggaacaaatacttctaaccaggttgctgttctttatcagggtgttaactgcacagaagtccctgttgctattcatgcagatcaacttactcctacttggcgtgtttattctacaggttctaatgtttttcaaacacgtgcaggctgtttaataggggctgaacatgtcaacaactcatatgagtgtgacatacccattggtgcaggtatatgcgctagttatcagactcagactaattctcctcggcgggcacgtagtgtagctagtcaatccatcattgcctacactatgtcacttggtgcagaaaattcagttgcttactctaataactctattgccatacccacaaattttactattagtgttaccacagaaattctaccagtgtctatgaccaagacatcagtagattgtacaatgtacatttgtggtgattcaactgaatgcagcaatcttttgttgcaatatggcagtttttgtacacaattaaaccgtgctttaactggaatagctgttgaacaagacaaaaacacccaagaagtttttgcacaagtcaaacaaatttacaaaacaccaccaattaaagattttggtggttttaatttttcacaaatattaccagatccatcaaaaccaagcaagaggtcatttattgaagatctacttttcaacaaagtgacacttgcagatgctggcttcatcaaacaatatggtgattgccttggtgatattgctgctagagacctcatttgtgcacaaaagtttaacggccttactgttttgccacctttgctcacagatgaaatgattgctcaatacacttctgcactgttagcgggtacaatcacttctggttggacctttggtgcaggtgctgcattacaaataccatttgctatgcaaatggcttataggtttaatggtattggagttacacagaatgttctctatgagaaccaaaaattgattgccaaccaatttaatagtgctattggcaaaattcaagactcactttcttccacagcaagtgcacttggaaaacttcaagatgtggtcaaccaaaatgcacaagctttaaacacgcttgttaaacaacttagctccaattttggtgcaatttcaagtgttttaaatgatatcctttcacgtcttgacaaagttgaggctgaagtgcaaattgataggttgatcacaggcagacttcaaagtttgcagacatatgtgactcaacaattaattagagctgcagaaatcagagcttctgctaatcttgctgctactaaaatgtcagagtgtgtacttggacaatcaaaaagagttgatttttgtggaaagggctatcatcttatgtccttccctcagtcagcacctcatggtgtagtcttcttgcatgtgacttatgtccctgcacaagaaaagaacttcacaactgctcctgccatttgtcatgatggaaaagcacactttcctcgtgaaggtgtctttgtttcaaatggcacacactggtttgtaacacaaaggaatttttatgaaccacaaatcattactacagacaacacatttgtgtctggtaactgtgatgttgtaataggaattgtcaacaacacagtttatgatcctttgcaacctgaattagactcattcaaggaggagttagataaatattttaagaatcatacatcaccagatgttgatttaggtgacatctctggcattaatgcttcagttgtaaacattcaaaaagaaattgaccgcctcaatgaggttgccaagaatttaaatgaatctctcatcgatctccaagaacttggaaagtatgagcagtatataaaatggccatggtacatttggctaggttttatagctggcttgattgccatagtaatggtgacaattatgctttgctgtatgaccagttgctgtagttgtctcaagggctgttgttcttgtggatcctgctgcaaatttgatgaanncgantctgagccagtgctcaaaggagtcaaattacattacacataaacgaacttatggatttgtttatgagaatcttcacaattggaactgtaactttgaagcaaggtgaaatcaaggatgctactccttcagattttgttcgcgctactgcaacgataccgatacaagcctcactccctttcggatggcttattgttggcgttgcacttcttgctgtttttcagagcgcttccaaaatcataaccctcaaaaagagatggcaactagcactctccaagggtgttcactttgtttgcaacttgctgttgttgtttgtaacagtttactcacaccttttgctcgttgctgctggccttgaagccccttttctctatctttatgctttagtctacttcttgcagagtataaactttgtaagaataataatgaggctttggctttgctggaaatgccgttccaaaaacccattactttatgatgccaactattttctttgctggcatactaattgttacgactattgtataccttacaatagtgtaacttcttcaattgtcattacttcaggtgatggcacaacaagtcctatttctgaacatgactaccagattggtggttatactgaaaaatgggaatctggagtaaaagactgtgttgtattacacagttacttcacttcagactattaccagctgtactcaactcaattgagtacagacactggtgttgaacatgttaccttcttcatctacaataaaattgttgatgagcctgaagaacatgtccaaattcacacaatcgacggttcatccggagttgttaatccagtaatggaaccaatttatgatgaaccgacgacgactactagcgtgcctttgtaagcacaagctgatgagtacgaacttatgtactcattcgtttcggaagagacaggtacgttaatagttaatagcgtacttctttttcttgctttcgtggtattcttgctagttacactagccatccttactgcgcttcgattgtgtgcgtactgctgcaatattgttaacgtgagtcttgtaaaaccttctttttacgtttactctcgtgttaaaaatctgaattcttctagagttcctgatcttccggtctaaacgaactaaatattatattagtttttctgtttggaactttaattttagccatggcagattccaacggtactattaccgttgaagagcttaaaaagctccttgaacaatggaacctagtaataggtttcctattccttacatggatttgtcttctacaatttgcctatgccaacaggaataggtttttgtatataattaagttaattttcctctggctgttatggccagtaactttagcttgttttgtgcttgctgctgtttacagaataaattggatcaccggtggaattgctatcgcaatggcttgtcttgtaggcttgatgtggctcagctacttcattgcttctttcagactgtttgcgcgtacgcgttccatgtggtcattcaatccagaaactaacattcttctcaacgtgccactccatggcactattctgaccagaccgcttctagaaagtgaactcgtaatcggagctgtgatccttcgtggacatcttcgtattgctggacaccatctaggacgctgtgacatcaaggacctgcctaaagaaatcactgttgctacatcacgaacgctttcttattacaaattgggagcttcgcagcgtgtagcaggtgactcaggttttgctgcatacagtcgctacaggattggcaactataaattaaacacagaccattccagtagcagtgacaatattgctttgcttgtacagtaagtgacaacagatgtttcatctcgttgactttcaggttactatagcagagatattactaattattatgaggacttttaaagtttccatttggaatcttgattacatcataaacctcataattaaaaatttatctaagtcactaactgagaataaatattctcaattagatgaagagcaaccaatggagattgattaaacgaacatgaaaattattcttttcttggcactgataacactcgctacttgtgagctttatcactaccaagagtgtgttagaggtacaacagtacttttaaaagaaccttgctcttctggaacatacgagggcaattcaccatttcatcctctagctgataacaaatttgcactgacttgctttagcactcaatttgcttttgcttgtcctgacggcgtaaaacacgtctatcagttacgtgccagatcagtttcacctaaactgttcatcagacaagaggaagttcaagaactttactctccaatttttcttattgttgcggcaatagtgtttataacactttgcttcacactcaaaagaaagacagaatgattgaactttcattaattgacttctatttgtgctttttagcctttctgctattccttgttttaattatgcttattatcttttggttctcacttgaactgcaagatcataatgaaacttgtcacgcctaaacgaacatgaaatttcttgttttcttaggaatcatcacaactgtagctgcatttcaccaagaatgtagtttacagtcatgtactcaacatcaaccatatgtagttgatgacccgtgtcctattcacttctattctaaatggtatattagagtaggagctagaaaatcagcacctttaattgaattgtgcgtggatgaggctggttctaaatcacccattcagtacatcgatatcggtaattatacagtttcctgtttaccttttacaattaattgccaggaacctaaattgggtagtcttgtagtgcgttgttcgttctatgaagactttttagagtatcatgacgttcgtgttgttttagatttcatctaaacgaacaaactaaaatgtctgataatggaccccaaaatcagcgaaatgcaccccgcattacgtttggtggaccctcagattcaactggcagtaaccagaatggagaacgcagtggggcgcgatcaaaacaacgtcggccccaaggtttacccaataatactgcgtcttggttcaccgctctcactcaacatggcaaggaagaccttaaattccctcgaggacaaggcgttccaattaacaccaatagcagtccagatgaccaaattggctactaccgaagagctaccagacgaattcgtggtggtgacggtaaaatgaaagatctcagtccaagatggtatttctactacctaggaactgggccagaagctggacttccctatggtgctaacaaagacggcatcatatgggttgcaactgagggagccttgaatacaccaaaagatcacattggcacccgcaatcctgctaacaatgctgcaatcgtgctacaacttcctcaaggaacaacattgccaaaaggcttctacgcagaagggagcagaggcggcagtcaagcctcttctcgttcctcatcacgtagtcgcaacagttcaagaaattcaactccaggcagcagtaggggaacttctcctgctagaatggctggcaatggcggtgatgctgctcttgctttgctgctgcttgacagattgaaccagcttgagagcaaaatgtctggtaaaggccaacaacaacaaggccaaactgtcactaagaaatctgctgctgaggcttctaagaagcctcggcaaaaacgtactgccactaaagcatacaatgtaacacaagctttcggcagacgtggtccagaacaaacccaaggaaattttggggaccaggaactaatcagacaaggaactgattacaaacattggccgcaaattgcacaatttgcccccagcgcttcagcgttcttcggaatgtcgcgcattggcatggaagtcacaccttcgggaacgtggttgacctacacaggtgccatcaaattggatgacaaagatccaaatttcaaagatcaagtcattttgctgaataagcatattgacgcatacaaaacattcccaccaacagagcctaaaaaggacaaaaagaagaaggctgatgaaactcaagccttaccgcagagacagaagaaacagcaaactgtgactcttcttcctgctgcagatttggatgatttctccaaacaattgcaacaatccatgagcagtgctgactcaactcaggcctaaactcatgcagaccacacaaggcagatgggctatataaacgttttcgcttttccgtttacgatatatagtctactcttgtgcagaatgaattctcgtaactacatagcacaagtagatgtagttaactttaatctcacatagcaatctttaatcagtgtgtaacattagggaggacttgaaagagccaccacattttcaccgaggccacgcggagtacgatcgagtgtacagtgaacaatgctagggagagctgcctatatggaagagccctaatgtgtaaaattaattttagtagtgctatccccatgtg

SEQ ID NO: 57 - DNA, 29810 bp, synthetic construct
  misc_feature 1..29810: note = Reconstituted virus 20
  source 1..29810: mol_type = other DNA
accaactttcgatctcttgtagatctgttctctaaacgaactttaaaatctgtgtggctgtcactcggctgcatgcttagtgcactcacgcagtataattaataactaattactgtcgttgacaggacacgagtaactcgtctatcttctgcaggctgcttacggtttcgtccgtgttgcagccgatcatcagcacatctaggttttgtccgggtgtgaccgaaaggtaagatggagagccttgtccctggtttcaacgagaaaacacacgtccaactcagtttgcctgttttacaggttcgcgacgtgctcgtacgtggctttggagactccgtggaggaggtcttatcagaggcacgtcaacatcttaaagatggcacttgtggcttagtagaagttgaaaaaggcgttttgcctcaacttgaacagccctatgtgttcatcaaacgttcggatgctcgaactgcacctcatggtcatgttatggttgagctggtagcagaactcgaaggcattcagtacggtcgtagtggtgagacacttggtgtccttgtccctcatgtgggcgaaataccagtggcttaccgcaaggttcttcttcgtaagaacggtaataaaggagctggtggccatagttacggcgccgatctaaagtcatttgacttaggcgacgagcttggcactgatccttatgaagattttcaagaaaactggaacactaaacatagcagtggtgttacccgtgaactcatgcgtgagcttaacggaggggcatacactcgctatgtcgataacaacttctgtggccctgatggctaccctcttgagtgcattaaagaccttctagcacgtgctggtaaagcttcatgcactttgtccgaacaactggactttattgacactaagaggggtgtatactgctgccgtgaacatgagcatgaaattgcttggtacacggaacgttctgaaaagagctatgaattgcagacaccttttgaaattaaattggcaaagaaatttgacaccttcaatggggaatgtccaaattttgtatttcccttaaattccataatcaagactattcaaccaagggttgaaaagaaaaagcttgatggctttatgggtagaattcgatctgtctatccagttgcgtcaccaaatgaatgcaaccaaatgtgcctttcaactctcatgaagtgtgatcattgtggtgaaacttcatggcagacgggcgattttgttaaagccacttgcgaattttgtggcactgagaatttgactaaagaaggtgccactacttgtggttacttaccccaaaatgctgttgttaaaatttattgtccagcatgtcacaattcagaagtaggacctgagcatagtcttgccgaataccataatgaatctggcttgaaaaccattcttcgtaagggtggtcgcactattgcctttggaggctgtgtgttctcttatgttggttgccataacaagtgtgcctattgggttccacgtgctagcgctaacataggttgtaaccatacaggtgttgttggagaaggttccgaaggtcttaatgacaaccttcttgaaatactccaaaaagagaaagtcaacatcaatattgttggtgactttaaacttaatgaagagatcgccattattttggcatctttttctgcttccacaagtgcttttgtggaaactgtgaaaggtttggattataaagcattcaaacaaattgttgaatcctgtggtaattttaaagttacaaaaggaaaagctaaaaaaggtgcctggaatattggtgaacagaaatcaatactgagtcctctttatgcatttgcatcagaggctgctcgtgttgtacgatcaattttctcccgcactcttgaaactgctcaaaattctgtgcgtgttttacagaaggccgctataacaatactagatggaatttcacagtattcactgagactcattgatgctatgatgttcacatctgatttggctactaacaatctagttgtaatggcctacattacaggtggtgttgttcagttgacttcgcagtggctaactaacatctttggcactgtttatgaaaaactcaaacccgtccttgattggcttgaagagaagtttaaggaaggtgtagagtttcttagagacggttgggaaattgttaaatttatctcaacctgtgcttgtgaaattgtcggtggacaaattgtcacctgtgcaaaggaaattaaggagagtgttcagacattctttaagcttgtaaataaatttttggctttgtgtgctgactctatcattattggtggagctaaacttaaagccttgaatttaggtgaaacatttgtcacgcactcaaagggattgtacagaaagtgtgttaaatccagagaagaaactggcctactcatgcctctaaaagccccaaaagaaattatcttcttagagggagaaacacttcccacagaagtgttaacagaggaagttgtcttgaaaactggtgatttacaaccattagaacaacctactagtgaagctgttgaagctccattggttggtacaccagtttgtattaacgggcttatgttgctcgaaatcaaagacacagaaaagtactgtgcccttgcacctaatatgatggtaacaaacaataccttcacactmaaaggcggtgcaccaacaaaggttacttttggtgatgacactgtgatagaagtgcaaggttacaagagtgtgaatatcacttttgaacttgatgaaaggattgataaagtacttaatgagaagtgctctgcctatacagttgaactcggtacagaagtaaatgagttcgcctgtgttgtggcagatgctgtcataaaaactttgcaaccagtatctgaattacttacaccactgggcattgatttagatgagtggagtatggctacatactacttatttgatgagtctggtgagtttaaattggcttcacatatgtattgttctttttaccctccagatgaggatgaagaagaaggtgattgtgaagaagaagagtttgagccatcaactcaatatgagtatggtactgaagatgattaccaaggtaaacctttggaatttggtgccacttctgctgctcttcaacctgaagaagagcaagaagaagattggttagatgatgatagtcaacaaactgttggtcaacaagacggcagtgaggacaatcagacaactactattcaaacaattgttgaggttcaacctcaattagagatggaacttacaccagttgttcagactattgaagtgaatagttttagtggttatttaaaacttactgacaatgtatacattaaaaatgcagacattgtggaagaagctaaaaaggtaaaaccaacagtggttgttaatgcagccaatgtttaccttaaacatggaggaggtgttgcaggagccttaaataaggctactaacaatgccatgcaagttgaatctgatgattacatagctactaatggaccacttaaagtgggtggtagttgtgttttaagcggacacaatcttgctaaacactgtcttcatgttgtcggcccaaatgttaacaaaggtgaagacattcaacttcttaagagtgcttatgaaaattttaatcagcacgaagttctacttgcaccattattatcagctggtatttttggtgctgaccctatacattctttaagagtttgtgtagatactgttcgcacaaatgtctacttagctgtctttgataaaaatctctatgacaaacttgtttcaagctttttggaaatgaagagtgaaaagcaagttgaacaaaagatcgctgagattcctaaagaggaagttaagccatttataactgaaagtaaaccttcagttgaacagagaaaacaagatgataagaaaatcaaagcttgtgttgaagaagttacaacaactctggaagaaactaagttcctcacagaaaacttgttactttatattgacattaatggcaatcttcatccagattctgccactcttgttagtgacattgacatcactttcttaaagaaagatgctccatatatagtgggtgatgttgttcaagagggtgttttaactgctgtggttatacctactaaaaaggctggtggcactactgaaatgctagcgaaagctttgagaaaagtgccaacagacaattatataaccacttacccgggtcagggtttaaatggttacactgtagaggaggcaaagacagtgcttaaaaagtgtaaaagtgccttttacattctaccatctattatctctaatgagaagcaagaaattcttggaactgtttcttggaatttgcgagaaatgcttgcacatgcagaagaaacacgcaaattaatgcctgtctgtgtggaaactaaagccatagtttcaactatacagcgtaaatataagggtattaaaatacaagagggtgtggttgattatggtgctagattttacttttacaccagtaaaacaactgtagcgtcacttatcaacacacttaacgatctaaatgaaactcttgttacaatgccacttggctatgtaacacatggcttaaatttggaagaagctgctcggtatatgagatctctcaaagtgccagctacagtttctgtttcttcacctgatgctgttacagcgtataatggttatcttacttcttcttctaaaacacctgaagaacattttattgaaaccatctcacttgctggttcctataaagattggtcctattctggacaatctacacaactaggtatagaatttcttaagagaggtgataaaagtgtatattacactagtaatcctaccacattccacctagatggtgaagttatcacctttgacaatcttaagacacttctttctttgagagaagtgaggactattaaggtgtttacaacagtagacaacattaacctccacacgcaagttgtggacatgtcaatgacatatggacaacagtttggtccaacttatttggatggagctgatgttactaaaataaaacctcataattcacatgaaggtaaaacattttatgttttacctaatgatgacactctacgtgttgaggcttttgagtactaccacacaactgatcctagttttctgggtaggtacatgtcagcattaaatcacactaaaaagtggaaatacccacaagttaatggtttaacttctattaaatgggcagataacaactgttatcttgccactgcattgttaacactccaacaaatagagttgaagtttaatccacctgctctacaagatgcttattacagagcaagggctggtgaagctgctaacttttgtgcacttatcttagcctactgtaataagacagtaggtgagttaggtgatgttagagaaacaatgagttacttgtttcaacatgccaatttagattcttgcaaaagagtcttgaacgtggtgtgtaaaacttgtggacaacagcagacaacccttaagggtgtagaagctgttatgtacatgggcacactttcttatgaacaatttaagaaaggtgttcagataccttgtacgtgtggtaaacaagctacaaaatatctagtacaacaggagtcaccttttgttatgatgtcagcaccacctgctcagtatgaacttaagcatggtacatttacttgtgctagtgagtacactggtaattaccagtgtggtcactataaacatataacttctaaagaaactttgtattgcatagacggtgctttacttacaaagtcctcagaatacaaaggtcctattacggatgttttctacaaagaaaacagttacacaacaaccataaaaccagttacttataaattggatggtgttgtttgtacagaaattgaccctaagttggacaattattataagaaagacaattcttatttcacagagcaaccaattgatcttgtaccaaaccaaccatatccaaacgcaagcttcgataattttaagtttgtatgtgataatatcaaatttgctgatgatttaaaccagtyaactggttataagaaacctgcttcaagagagcttaaagttacatttttccctgacttaaatggtgatgtggtggctattgattataaacactacacaccctcttttaagaaaggagctaaattgttacataaacctattgtttggcatgttaacaatgcaactaataaagccacgtataaaccaaatacctggtgtatacgttgtctttggagcacaaaaccagttgaaacatcaaattcgtttgatgtactgaagtcagaggacgcgcagggaatggataatcttgcctgcgaagatctaaaaccagtctctgaagaagtagtggaaaatcctaccatacagaaagacgttcttgagtgtaatgtgaaaactaccgaagttgtaggagacattatacttaaaccagcaaataatagtttaaaaattacagaagaggttggccacacagatctaatggctgcttatgtagacaattctagtcttactattaagaaacctaatgaattatctagagtattaggtttgaaaacccttgctactcatggtttagctgctgttaatagtgtcccttgggatactatagctaattatgctaagccttttcttaacaaagttgttagtacaactactaacatagttacacggtgtttaaaccgtgtttgtactaattatatgccttatttctttactttattgctacaattgtgtacttttactagaagtacaaattctagaattaaagcatctatgccgactactatagcaaagaatactgttaagagtgtcggtaaattttgtctagaggcttcatttaattatttgaagtcacctaatttttctaaactgataaatattataatttggtttttactattaagtgtttgcctaggttctttaatctactcaaccgctgctttaggtgttttaatgtctaatttaggcatgccttcttactgtactggttacagagaaggctatttgaactctactaatgtcactattgcaacctactgtactggttctataccttgtagtgtttgtcttagtggtttagattctttagacacctatccttctttagaaactatacaaattaccatttcatcttttaaatgggatttaactgcttttggcttagttgcagagtggtttttggcatatattcttttcactaggtttttctatgtacttggattggctgcaatcatgcaattgtttttcagctattttgcagtacattttattagtaattcttggcttatgtggttaataattaatcttgtacaaatggccccgatttcagctatggttagaatgtacatcttctttgcatcattttattatgtatggaaaagttatgtgcatgttgtagacggttgtaattcatcaacttgtatgatgtgttacaaacgtaatagagcaacaagagtcgaatgtacaactattgttaatggtgttagaaggtccttttatgtctatgctaatggaggtaaaggcttttgcaaactacacaattggaattgtgttaattgtgatacattctgtgctggtagtacatttattagtgatgaagttgcgagagacttgtcactacagtttaaaagaccaataaatcctactgaccagtcttcttacatcgttgatagtgttacagtgaagaatggttccatccatctttactttgataaagctggtcaaaagacttatgaaagacattctctctctcattttgttaacttagacaacctgagagctaataacactaaaggttcattgcctattaatgttatagtttttgatggtaaatcaaaatgtgaagaatcatctgcaaaatcagcgtctgtttactacagtcagcttatgtgtcaacctatactgttactagatcaggcattagtgtctgatgttggtgatagtgcggaagttgcagttaaaatgtttgatgcttacgttaatacgttttcatcaacttttaacgtaccaatggaaaaactcaaaacactagttgcaactgcagaagctgaacttgcaaagaatgtgtccttagacaatgtcttatctacttttatttcagcagctcggcaagggtttgttgattcagatgtagaaactaaagatgttgttgaatgtcttaaattgtcacatcaatctgacatagaagttactggcgatagttgtaataactatatgctcacctataacaaagttgaaaacatgacaccccgtgaccttggtgcttgtattgactgtagtgcgcgtcatattaatgcgcaggtagcaaaaagtcacaacattgctttgatatggaacgttaaagatttcatgtcattgtctgaacaactacgaaaacaaatacgtagtgctgctaaaaagaataacttaccttttaagttgacatgtgcaactactagacaagttgttaatgttgtaacaacaaagatagcacttaagggtggtaaaattgttaataattggttgaagcagttaattaaagttacacttgtgttcctttttgttgctgctattttctatttaataacacctgttcatgtcatgtctaaacatactgacttttcaagtgaaatcataggatacaaggctattgatggtggtgtcactcgtgacatagcatctacagatacttgttttgctaacaaacatgctgattttgacacatggtttagccagcgtggtggtagttatactaatgacaaagcttgcccattgattgctgcagtcataacaagagaagtgggttttgtcgtgcctggtttgcctggcacgatattacgcacaactaatggtgactttttgcatttcttacctagagtttttagtgcagttggtaacatctgttacacaccatcaaaacttatagagtacactgactttgcaacatcagcttgtgttttggctgctgaatgtacaatttttaaagatgcttctggtaagccagtaccatattgttatgataccaatgtactagaaggttctgttgcttatgaaagtttacgccctgacacacgttatgtgctcatggatggctctattattcaatttcctaacacctaccttgaaggttctgttagagtggtaacaacttttgattctgagtactgtaggcacggcacttgtgaaagatcagaagctggtgtttgtgtatctactagtggtagatgggtacttaacaatgattattacagatctttaccaggagttttctgtggtgtagatgctgtaaatttacttactaatatgtttacaccactaattcaacctattggtgctttggacatatcagcatctatagtagctggtggtattgtagctatcgtagtaacatgccttgcctactattttatgaggtttagaagagcttttggtgaatacagtcatgtagttgcctttaatactttactattccttatgtcattcactgtactctgtttaacaccagtttactcattcttacctggtgtttattctgttatttacttgtacttgacattttatcttactaatgatgtttcttttttagcacatattcagtggatggttatgttcacacctttagtacctttctggataacaattgcttatatcatttgtatttccacaaagcatttctattggttctttagtaattacctaaagagacgtgtagtctttaatggtgtttcctttagtacttttgaagaagctgcgctgtgcacctttttgttaaataaagaaatgtatctaaagttgcgtagtgatgtgctattacctcttacgcaatataatagatacttagctctttataataagtacaagtattttagtggagcaatggatacaactagctacagagaagctgcttgttgtcatctcgcaaaggctctcaatgacttcagtaactcaggttctgatgttctttaccaaccaccacaaacctctatcacctcagctgttttgcagagtggttttagaaaaatggcattcccatctggtaaagttgagggttgtatggtacaagtaacttgtggtacaactacacttaacggtctttggcttgatgacgtagtttactgtccaagacatgtgatctgcacctctgaagacatgcttaaccctaattatgaagatttactcattcgtaagtctaatcataatttcttggtacaggctggtaatgttcaactcagggttattggacattctatgcaaaattgtgtacttaagcttaaggttgatacagccaatcctaagacacctaagtataagtttgttcgcattcaaccaggacagactttttcagtgttagcttgttacaatggttcaccatctggtgtttaccaatgtgctatgaggcccaatttcactattaagggttcattccttaatggttcatgtggtagtgttggttttaacatagattatgactgtgtctctttttgttacatgcaccatatggaattaccaactggagttcatgctggcacagacttagaaggtaacttttatggaccttttgttgacaggcaaacagcacaagcagctggtacggacacaactattacagttaatgttttagcttggttgtacgctgctgttataaatggagacaggtggtttctcaatcgatttaccacaactcttaatgactttaaccttgtggctatgaagtacaattatgaacctctaacacaagaccatgttgacatactaggacctctttctgctcaaactggaattgccgttttagatatgtgtgcttcattaaaagaattactgcaaaatggtatgaatggacgtaccatattgggtagtgctttattagaagatgaatttacaccttttgatgttgttagacaatgctcaggtgttactttccaaagtgcagtgaaaagaacaatcaagggtacacaccactggttgttactcacaattttgacttcacttttagttttagtccagagtactcaatggtctttgttcttttttttgtatgaaaatgcctttttaccttttgctatgggtattattgctatgtctgcttttgcaatgatgtttgtcaaacataagcatgcatttctctgtttgtttttgttaccttctcttgccactgtagcttattttaatatggtctatatgcctgctagttgggtgatgcgtattatgacatggttggatatggttgatactagtttgtctggttttaagctaaaagactgtgttatgtatgcatcagctgtagtgttactaatccttatgacagcaagaactgtgtatgatgatggtgctaggagagtgtggacacttatgaatgtcttgacactcgtttataaagtttattatggtaatgctttagatcaagccatttccatgtgggctcttataatctctgttacttctaactactcaggtgtagttacaactgtcatgtttttggccagaggtattgtttttatgtgtgttgagtattgccctattttcttcataactggtaatacacttcagtgtataatgctagtttattgtttcttaggctatttttgtacttgttactttggcctcttttgtttactcaaccgctactttagactgactcttggtgtttatgattacttagtttctacacaggagtttagatatatgaattcacagggactactcccacccaagaatagcatagatgccttcaaactcaacattaaattgttgggtgttggtggcaaaccttgtatcaaagtagccactgtacagtctaaaatgtcagatgtaaagtgcacatcagtagtcttactctcagttttgcaacaactcagagtagaatcatcatctaaattgtgggctcaatgtgtccagttacacaatgacattctcttagctaaagatactactgaagcctttgaaaaaatggtttcactactttctgttttgctttccatgcagggtgctgtagacataaacaagctttgtgaagaaatgctggacaacagggcaaccttacaagctatagcctcagagtttagttcccttccatcatatgcagcttttgctactgctcaagaagcttatgagcaggctgttgctaatggtgattctgaagttgttcttaaaaagttgaagaagtctttgaatgtggctaaatctgaatttgaccgtgatgcagccatgcaacgtaagttggaaaagatggctgatcaagctatgacccaaatgtataaacaggctagatctgaggacaagagggcaaaagttactagtgctatgcagacaatgcttttcactatgcttagaaagttggataatgatgcactcaacaacattatcaacaatgcaagagatggttgtgttcccttgaacataatacctcttacaacagcagccaaactaatggttgtcataccagactataacacatataaaaatacgtgtgatggtacaacatttacttatgcatcagcattgtgggaaatccaacaggttgtagatgcagatagtaaaattgttcaacttagtgaaattagtatggacaattcacctaatttagcatggcctcttattgtaacagctttaagggccaattctgctgtcaaattacagaataatgagcttagtcctgttgcactacgacagatgtcttgtgctgccggtactacacaaactgcttgcactgatgacaatgcgttagcttactacaacacaacaaagggaggtaggtttgtacttgcactgttatccgatttacaggatttgaaatgggctagattccctaagagtgatggaactggtactatctatacagaactggaaccaccttgtaggtttgttacagacacacctaaaggtcctaaagtgaagtatttatactttattaaaggattaaacaacctaaatagaggtatggtacttggtagtttagctgccacagtacgtctacaagctggtaatgcaacagaagtgcctgccaattcaactgtattatctttctgtgcttttgctgtagatgctgctaaagcttacaaagattatctagctagtgggggacaaccaatcactaattgtgttaagatgttgtgtacacacactggtactggtcaggcaataacagttacaccggaagccaatatggatcaagaatcctttggtggtgcatcgtgttgtctgtactgccgttgccacatagatcatccaaatcctaaaggattttgtgacttaaaaggtaagtatgtacaaatacctacaacttgtgctaatgaccctgtgggttttacacttaaaaacacagtctgtaccgtctgcggtatgtggaaaggttatggctgtagttgtgatcaactccgcgaacccatgcttcagtcagctgatgcacaatcgtttttaaacgggtttgcggtgtaagtgcagcccgtcttacaccgtgcggcacaggcactagtactgatgtcgtatacagggcttttgacatctacaatgataaagtagctggttttgctaaattcctaaaaactaattgttgtcgcttccaagaaaaggacgaagatgacaatttaattgattcttactttgtagttaagagacacactttctctaactaccaacatgaagaaacaatttataatttacttaaggattgtccagctgttgctaaacatgacttctttaagtttagaatagacggtgacatggtaccacatatatcacgtcaacgtcttactaaatacacaatggcagacctcgtctatgctttaaggcattttgatgaaggtaattgtgacacattaaaagaaatacttgtcacatacaattgttgtgatgatgattatttcaataaaaaggactggtatgattttgtagaaaacccagatatattacgcgtatacgccaacttaggtgaacgtgtacgccaagctttgttaaaaacagtacaattctgtgatgccatgcgaaatgctggtattgttggtgtactgacattagataatcaagatctcaatggtaactggtatgatttcggtgatttcatacaaaccacgccaggtagtggagttcctgttgtagattcttattattcattgttaatgcctatattaaccttgaccagggctttaactgcagagtcacatgttgacactgacttaacaaagccttacattaagtgggatttgttaaaatatgacttcacggaagagaggttaaaactctttgaccgttattttaaatattgggatcagacataccacccaaattgtgttaactgtttggatgacagatgcattctgcattgtgcaaactttaatgttttattctctacagtgttcccacttacaagttttggaccactagtgagaaaaatatttgttgatggtgttccatttgtagtttcaactggataccacttcagagagctaggtgttgtacataatcaggatgtaaatttacatagctctagacttagttttaaggaattacttgtgtatgctgctgaccctgctatgcacgctgcttctggtaatctattactagataaacgcactacgtgcttttcagtagctgcacttactaacaatgttgcttttcaaactgtcaaacccggtaattttaacaaagacttctatgactttgctgtgtctaagggtttctttaaggaaggaagttctgttgaattaaaacacttcttctttgctcaggatggtaatgctgctatcagcgattatgactactatcgttataatctaccaacaatgtgtgatatcagacaactactatttgtagttgaagttgttgataagtactttgattgttacgatggtggctgtattaatgctaaccaagtcatcgtcaacaacctagacaaatcagctggttttccatttaataaatggggtaaggctagactttattatgattcaatgagttatgaggatcaagatgcacttttcgcatatacaaaacgtaatgtcatccctactataactcaaatgaatcttaagtatgccattagtgcaaagaatagagctcgcaccgtagctggtgtctctatctgtagtactatgaccaatagacagtttcatcaaaaattattgaaatcaatagccgccactagaggagctactgtagtaattggaacaagcaaattctatggtggttggcacaacatgttaaaaactgtttatagtgatgtagaaaaccctcaccttatgggttgggattatcctaaatgtgatagagccatgcctaatatgcttagaattatggcctcacttgttcttgctcgcaaacatacaacgtgttgtagcttgtcacaccgtttctatagattagctaatgagtgtgctcaagtattgagtgaaatggtcatgtgtggcggttcactatatgttaaaccaggtggaacctcatcaggagatgccacaactgcttatgctaatagtgtttttaacatttgtcaagctgtcacggccaatgttaatgcacttttatctactgatggtaacaaaattgccgataagtatgtccgcaatttacaacacagactttatgagtgtctctatagaaatagagatgttgacacagactttgtgaatgagttttacgcatatttgcgtaaacatttctcaatgatgatactctctgacgatgctgttgtgtgtttcaatagcacttatgcatctcaaggtctagtggctagcataaagaactttaagtcagttctttattatcaaaacaatgtttttatgtctgaagcaaaatgttggactgagactgaccttactaaaggacctcatgaattttgctctcaacatacaatgctagttaaacagggtgatgattatgtgtaccttccttacccagatccatcaagaatcctaggggccggctgttttgtagatgatatcgtaaaaacagatggtacacttatgattgaacggttcgtgtctttagctatagatgcttacccacttactaaacatcctaatcaggagtatgctgatgtctttcatttgtacttacaatacataagaaagctacatgatgagttaacaggacacatgttagacatgtattctgttatgcttactaatgataacacttcaaggtattgggaacctgagttttatgaggctatgtacacaccgcatacagtcttacaggctgttggggcttgtgttctttgcaattcacagacttcattaagatgtggtgcttgcatacgtagaccattcttatgttgtaaatgctgttacgaccatgtcatatcaacatcacataaattagtcttgtctgttaatccgtatgtttgcaatgctccaggttgtgatgtcacagatgtgactcaactttacttaggaggtatgagctattattgtaaatcacataaaccacccattagttttccattgtgtgctaatggacaagtttttggtttatataaaaatacatgtgttggtagcgataatgttactgactttaatgcaattgcaacatgtgactggacaaatgctggtgattacattttagctaacacctgtactgaaagactcaagctttttgcagcagaaacgctcaaagctactgaggagacatttaaactgtcttatggtattgctactgtacgtgaagtgctgtctgacagagaattacatctttcatgggaagttggtaaacctagaccaccacttaaccgaaattatgtctttactggttatcgtgtaactaaaaacagtaaagtacaaataggagagtacacctttgaaaaaggtgactatggtgatgctgttgtttaccgaggtacaacaacttacaaattaaatgttggtgattattttgtgctgacatcacatacagtaatgccattaagtgcacctacactagtgccacaagagcactatgttagaattactggcttatacccaacactcaatatctcagatgagttttctagcaatgttgcaaattatcaaaaggttggtatgcaaaagtattctacactccagggaccacctggtactggtaagagtcattttgctattggcctagctctctactacccttctgctcgcatagtgtatacagcttgctctcatgccgctgttgatgcactatgtgagaaggcattaaaatatttgcctatagataaatgtagtagaattatacctgcacgtgctcgtgtagagtgttttgataaattcaaagtgaattcaacattagaacagtatgtcttttgtactgtaaatgcattgcctgagacgacagcagatatagttgtctttgatgaaatttcaatggccacaaattatgatttgagtgttgtcaatgccagattacgtgctaagcactatgtgtacattggcgaccctgctcaattacctgcaccacgcacattgctaactaagggcacactagaaccagaatatttcaattcagtgtgtagacttatgaaaactataggtccagacatgttcctcggaacttgtcggcgttgtcctgctgaaattgttgacactgtgagtgctttggtttatgataataagcttaaagcacataaagacaaatcagctcaatgctttaaaatgttttataagggtgttatcacgcatgatgtttcatctgcaattaacaggccacaaataggcgtggtaagagaattccttacacgtaaccctgcttggagaaaagctgtctttatttcaccttataattcacagaatgctgtagcctcaaagattttgggactaccaactcaaactgttgattcatcacagggctcagaatatgactatgtcatattcactcaaaccactgaaacagctcactcttgtaatgtaaacagatttaatgttgctattaccagagcaaaagtaggcatactttgcataatgtctgatagagacctttatgacaagttgcaatttacaagtcttgaaattccacgtaggaatgtggcaactttacaagctgaaaatgtaacaggactctttaaagattgtagtaaggtaatcactgggttacatcctacacaggcacctacacacctcagtgttgacactaaattcaaaactgaaggtttatgtgttgacatacctggcatacctaaggacatgacctatagaagactcatctctatgatgggttttaaaatgaattatcaagttaatggttaccctaacatgtttatcacccgcgaagaagctataagacatgtacgtgcatggattggcttcgatgtcgaggggtgtcatgctactagagaagctgttggtaccaatttacctttacagctaggtttttctacaggtgttaacctagttgctgtacctacaggttatgttgatacacctaataatacagatttttccagagttagtgctaaaccaccgcctggagatcaatttaaacacctcataccacttatgtacaaaggacttccttggaatgtagtgcgtataaagattgtacaaatgttaagtgacacacttaaaaatctctctgacagagtcgtatttgtcttatgggcacatggctttgagttgacatctatgaagtattttgtgaaaataggacctgagcgcacctgttgtctatgtgatagacgtgccacatgcttttccactgcttcagacacttatgcctgttggcatcattctattggatttgattacgtctataatccgtttatgattgatgttcaacaatggggttttacaggtaacctacaaagcaaccatgatctgtattgtcaagtccatggtaatgcacatgtagctagttgtgatgcaatcatgactaggtgtctagctgtccacgagtgctttgttaagcgtgttgactggactattgaatatcctataattggtgatgaactgaagattaatgcggcttgtagaaaggttcaacacatggttgttaaagctgcattattagcagacaaattcccagttcttcacgacattggtaaccctaaagctattaagtgtgtacctcaagctgatgtagaatggaagttctatgatgcacagccttgtagtgacaaagcttataaaatagaagaattattctattcttatgccacacattctgacaaattcacagatggtgtatgcctattttggaattgcaatgtcgatagatatcctgctaattccattgtttgtagatttgacactagagtgctatctaaccttaacttgcctggttgtgatggtggcagtttgtatgtaaataaacatgcattccacacaccagcttttgataaaagtgcttttgttaatttaaaacaattaccatttttctattactctgacagtccatgtgagtctcatggaaaacaagtagtgtcagatatagattatgtaccactaaagtctgctacgtgtataacacgttgcaatttaggtggtgctgtctgtagacatcatgctaatgagtacagattgtatctcgatgcttataacatgatgatctcagctggctttagcttgtgggtttacaaacaatttgatacttataacctctggaacacttttacaagacttcagagtttagaaaatgtggcttttaatgttgtaaataagggacactttgatggacaacagggtgaagtaccagtttctatcattaataacactgtttacacaaaagttgatggtgttgatgtagaattgtttgaaaataaaacaacattacctgttaatgtagcatttgagctttgggctaagcgcaacattaaaccagtaccagaggtgaaaatactcaataatttgggtgtggacattgctgctaatactgtgatctgggactacaaaagagatgctccagcacatatatctactattggtgtttgttctatgactgacatagccaagaaaccaactgaaacgatttgtgcaccactcactgtcttttttgatggtagagttgatggtcaagtagacttatttagaaatgcccgtaatggtgttcttattacagaaggtagtgttaaaggtttacaaccatctgtaggtcccaaacaagctagtcttaatggagtcacattaattggagaagccgtaaaaacacagttcaattattataagaaagttgatggtgttgtccaacaattacctgaaacttactttactcagagtagaaatttacaagaatttaaacccaggagtcaaatggaaattgatttcttagaattagctatggatgaattcattgaacggtataaattagaaggctatgccttcgaacatatcgtttatggagattttagtcatagtcagttaggtggtttacatctactgattggactagctaaacgttttaaggaatcaccttttgaattagaagattttattcctatggacagtacagttaaaaactatttcataacagatgcgcaaacaggttcatctaagtgtgtgtgttctgttattgatttattacttgatgattttgttgaaataataaaatcccaagatttatctgtaktttctaaggttgtcaaagtgactattgactatacagaaatttcatttatgctttggtgtaaagatggccatgtagaaacattttacccaaaattacaatctagtcaagcgtggcaaccgggtgttgctatgcctaatctttacaaaatgcaaagaatgctattagaaaagtgtgaccttcaaaattatggtgatagtgcaacattacctaaaggcataatgatgaatgtcgcaaaatatactcaactgtgtcaatatttaaacacattaacattagctgtaccctataatatgagagttatacattttggtgctggttctgataaaggagttgcaccaggtacagctgttttaagacagtggttgcctacgggtacgctgcttgtcgactcagatcttaatgactttgtctctgatgcagattcaactttgattggtgattgtgcaactgtacatacagctaataaatgggatctcattattagtgatatgtacgaccctaagactaaaaatgttacaaaagaaaatgactctaaagagggttttttcacttacatttgtgggtttatacaacaaaagctagctcttggaggttccgtggctataaagataacagaacattcttggaatgctgatctttataagctcatgggacacttcgcatggtggacagcctttgttactaatgtgaatgcgtcatcatctgaagcatttttaattggatgtaattatcttggcaaaccacgcgaacaaatagatggttatgtcatgcatgcaaattacatattttggaggaatacaaatccaattcagttgtcttcctattctttatttgacatgagtaaatttccccttaaattaaggggtactgctgttatgtctttaaaagaaggtcaaatcaatgatatgattttatctcttcttagtaaaggtagacttataattagagaaaacaacagagttgttatttctagtgatgttcttgttaacaactaaacgaacaatgtttgtttttcttgttttattgccactagtctctagtcagtgtgttaatcttacaaccagaactcaattaccccctgcatacactaattctttcacacgtggtgtttattaccctgacaaagttttcagatcctcagttttacattcaactcaggacttgttcttacctttcttttccaatgttacttggttccatgctatacatgtctctgggaccaatggtactaagaggtttgataaccctgtcctaccatttaatgatggtgtttattttgcttccactgagaagtctaacataataagaggctggatttttggtactactttagattcgaagacccagtccctacttattgttaataacgctactaatgttgttattaaagtctgtgaatttcaattttgtaatgatccatttttgggtgtttattaccacaaaaacaacaaaagttggatggaaagtgagttcagagtttattctagtgcgaataattgcacttttgaatatgtctctcagccttttcttatggaccttgaaggaaaacagggtaatttcaaaaatcttagggaatttgtgtttaagaatattgatggttattttaaaatatattctaagcacacgcctattaatttagtgcgtgatctccctcagggtttttcggctttagaaccattggtagatttgccaataggtattaacatcactaggtttcaaactttacttgctttacatagaagttatttgactcctggtgattcttcttcaggttggacagctggtgctgcagcttattatgtgggttatcttcaacctaggacttttctattaaaatataatgaaaatggaaccattacagatgctgtagactgtgcacttgaccctctctcagaaacaaagtgtacgttgaaatccttcactgtagaaaaaggaatctatcaaacttctaactttagagtccaaccaacagaatctattgttagatttcctaatattacaaacttgtgcccttttggtgaagtttttaacgccaccagatttgcatctgtttatgcttggaacaggaagagaatcagcaactgtgttgctgattattctgtcctatataattccgcatcattttccacttttaagtgttatggagtgtctcctactaaattaaatgatctctgctttactaatgtctatgcagattcatttgtaattagaggtgatgaagtcagacaaatcgctccagggcaaactggaaagattgctgattataattataaattaccagatgattttacaggctgcgttatagcttggaattctaacaatcttgattctaaggttggtggtaattataattacctgtatagattgtttaggaagtctaatctcaaaccttttgagagagatatttcaactgaaatctatcaggccggtagcacaccttgtaatggtgttgaaggttttaattgttactttcctttacaatcatatggtttccaacccactaatggtgttggttaccaaccatacagagtagtagtactttcttttgaacttctacatgcaccagcaactgtttgtggacctaaaaagtctactaatttggttaaaaacaaatgtgtcaatttcaacttcaatggtttaacaggcacaggtgttcttactgagtctaacaaaaagtttctgcctttccaacaatttggcagagacattgctgacactactgatgctgtccgtgatccacagacacttgagattcttgacattacaccatgttcttttggtggtgtcagtgttataacaccaggaacaaatacttctaaccaggttgctgttctttatcagggtgttaactgcacagaagtccctgttgctattcatgcagatcaacttactcctacttggcgtgtttattctacaggttctaatgtttttcaaacacgtgcaggctgtttaataggggctgaacatgtcaacaactcatatgagtgtgacatacccattggtgcaggtatatgcgctagttatcagactcagactaattctcctcrgcgggcacgtagtgtagctagtcaatccatcattgcctacactatgtcacttggtgcagaaaattcagttgcttactctaataactctattgccatacccacaaattttactattagtgttaccacagaaattctaccagtgtctatgaccaagacatcagtagattgtacaatgtacatttgtggtgattcaactgaatgcagcaatcttttgttgcaatatggcagtttttgtacacaattaaaccgtgctttaactggaatagctgttgaacaagacaaaaacacccaagaagtttttgcacaagtcaaacaaatttacaaaacaccaccaattaaagattttggtggttttaatttttcacaaatattaccagatccatcaaaaccaagcaagaggtcatttattgaagatctacttttcaacaaagtgacacttgcagatgctggcttcatcaaacaatatggtgattgccttggtgatattgctgctagagacctcatttgtgcacaaaagtttaacggccttactgttttgccacctttgctcacagatgaaatgattgctcaatacacttctgcactgttagcgggtacaatcacttctggttggacctttggtgcaggtgctgcattacaaataccatttgctatgcaaatggcttataggtttaatggtattggagttacacagaatgttctctatgagaaccaaaaattgattgccaaccaatttaatagtgctattggcaaaattcaagactcactttcttccacagcaagtgcacttggaaaacttcaagatgtggtcaaccaaaatgcacaagctttaaacacgcttgttaaacaacttagctccaattttggtgcaatttcaagtgttttaaatgatatcctttcacgtcttgacaaagttgaggctgaagtgcaaattgataggttgatcacaggcagacttcaaagtttgcagacatatgtgactcaacaattaattagagctgcagaaatcagagcttctgctaatcttgctgctactaaaatgtcagagtgtgtacttggacaatcaaaaagagttgatttttgtggaaagggctatcatcttatgtccttccctcagtcagcacctcatggtgtagtcttcttgcatgtgacttatgtccctgcacaagaaaagaacttcacaactgctcctgccatttgtcatgatggaaaagcacactttcctcgtgaaggtgtctttgtttcaaatggcacacactggtttgtaacacaaaggaatttttatgaaccacaaatcattactacagacaacacatttgtgtctggtaactgtgatgttgtaataggaattgtcaacaacacagtttatgatcctttgcaacctgaattagactcattcaaggaggagttagataaatattttaagaatcatacatcaccagatgttgatttaggtgacatctctggcattaatgcttcagttgtaaacattcaaaaagaaattgaccgcctcaatgaggttgccaagaatttaaatgaatctctcatcgatctccaagaacttggaaagtatgagcagtatataaaatggccatggtacatttggctaggttttatagctggcttgattgccatagtaatggtgacaattatgctttgctgtatgaccagttgctgtagttgtctcaagggctgttgttcttgtggatcctgctgcaaatttgatgaagacgactctgagccagtgctcaaaggagtcaaattacattacacataaacgaacttatggatttgtttatgagaatcttcacaattggaactgtaactttgaagcaaggtgaaatcaaggatgctactccttcagattttgttcgcgctactgcaacgataccgatacaagcctcactccctttcggatggcttattgttggcgttgcacttcttgctgtttttcagagcgcttccaaaatcataaccctcaaaaagagatggcaactagcactctccaagggtgttcactttgtttgcaacttgctgttgttgtttgtaacagtttactcacaccttttgctcgttgctgctggccttgaagccccttttctctatctttatgctttagtctacttcttgcagagtataaactttgtaagaataataatgaggctttggctttgctggaaatgccgttccaaaaacccattactttatgatgccaactattttctttgctggcatactaattgttacgactattgtataccttacaatagtgtaacttcttcaattgtcattacttcaggtgatggcacaacaagtcctatttctgaacatgactaccagattggtggttatactgaaaaatgggaatctggagtaaaagactgtgttgtattacacagttacttcacttcagactattaccagctgtactcaactcaattgagtacagacactggtgttgaacatgttaccttcttcatctacaataaaattgttgatgagcctgaagaacatgtccaaattcacacaatcgacggttcatccggagttgttaatccagtaatggaaccaatttatgatgaaccgacgacgactactagcgtgcctttgtaagcacaagctgatgagtacgaacttatgtactcattcgtttcggaagagacaggtacgttaatagttaatagcgtacttctttttcttgctttcgtggtattcttgctagttacactagccatccttactgcgcttcgattgtgtgcgtactgctgcaatattgttaacgtgagtcttgtaaaaccttctttttacgtttactctcgtgttaaaaatctgaattcttctagagttcctgatcttccggtctaaacgaactaaatattatattagtttttctgtttggaactttaattttagccatggcagattccaacggtactattaccgttgaagagcttaaaaagctccttgaacaatggaacctagtaataggtttcctattccttacatggatttgtcttctacaatttgcctatgccaacaggaataggtttttgtatataattaagttaattttcctctggctgttatggccagtaactttagcttgttttgtgcttgctgctgtttacagaataaattggatcaccggtggaattgctatcgcaatggcttgtcttgtaggcttgatgtggctcagctacttcattgcttctttcagactgtttgcgcgtacgcgttccatgtggtcattcaatccagaaactaacattcttctcaacgtgccactccatggcactattctgaccagaccgcttctagaaagtgaactcgtaatcggagctgtgatccttcgtggacatcttcgtattgctggacaccatctaggacgctgtgacatcaaggacctgcctaaagaaatcactgttgctacatcacgaacgctttcttattacaaattgggagcttcgcagcgtgtagcaggtgactcaggttttgctgcatacagtcgctacaggattggcaactataaattaaacacagaccattccagtagcagtgacaatattgctttgcttgtacagtaagtgacaacagatgtttcatctcgttgactttcaggttactatagcagagatattactaattattatgaggacttttaaagtttccatttggaatcttgattacatcataaacctcataattaaaaatttatctaagtcactaactgagaataaatattctcaattagatgaagagcaaccaatggagattgattaaacgaacatgaaaattattcttttcttggcactgataacactcgctacttgtgagctttatcactaccaagagtgtgttagaggtacaacagtacttttaaaagaaccttgctcttctggaacatacgagggcaattcaccatttcatcctctagctgataacaaatttgcactgacttgctttagcactcaatttgcttttgcttgtcctgacggcgtaaaacacgtctatcagttacgtgccagatcagtttcacctaaactgttcatcagacaagaggaagttcaagaactttactctccaatttttcttattgttgcggcaatagtgtttataacactttgcttcacactcaaaagaaagacagaatgattgaactttcattaattgacttctatttgtgctttttagcctttctgctattccttgttttaattatgcttattatcttttggttctcacttgaactgcaagatcataatgaaacttgtcacgcctaaacgaacatgaaatttcttgttttcttaggaatcatcacaactgtagctgcatttcaccaagaatgtagtttacagtcatgtactcaacatcaaccatatgtagttgatgacccgtgtcctattcacttctattctaaatggtatattagagtaggagctagaaaatcagcacctttaattgaattgtgcgtggatgaggctggttctaaatcacccattcagtacatcgatatcggtaattatacagtttcctgtttaccttttacaattaattgccaggaacctaaattgggtagtcttgtagtgcgttgttcgttctatgaagactttttagagtatcatgacgttcgtgttgttttagatttcatctaaacgaacaaactaaaatgtctgataatggaccccaaaatcagcgaaatgcaccccgcattacgtttggtggaccctcagattcaactggcagtaaccagaatggagaacgcagtggggcgcgatcaaaacaacgtcggccccaaggtttacccaataatactgcgtcttggttcaccgctctcactcaacatggcaaggaagaccttaaattccctcgaggacaaggcgttccaattaacaccaatagcagtccagatgaccaaattggctactaccgaagagctaccagacgaattcgtggtggtgacggtaaaatgaaagatctcagtccaagatggtatttctactacctaggaactgggccagaagctggacttccctatggtgctaacaaagacggcatcatatgggttgcaactgagggagccttgaatacaccaaaagatcacattggcacccgcaatcctgctaacaatgctgcaatcgtgctacaacttcctcaaggaacaacattgccaaaaggcttctacgcagaagggagcagaggcggcagtcaagcctcttctcgttcctcatcacgtagtcgcaacagttcaagaaattcaactccaggcagcagtaggggaacttctcctgctagaatggctggcaatggcggtgatgctgctcttgctttgctgctgcttgacagattgaaccagcttgagagcaaaatgtctggtaaaggccaacaacaacaaggccaaactgtcactaagaaatctgctgctgaggcttctaagaagcctcggcaaaaacgtactgccactaaagcatacaatgtaacacaagctttcggcagacgtggtccagaacaaacccaaggaaattttggggaccaggaactaatcagacaaggaactgattacaaacattggccgcaaattgcacaatttgcccccagcgcttcagcgttcttcggaatgtcgcgcattggcatggaagtcacaccttcgggaacgtggttgacctacacaggtgccatcaaattggatgacaaagatccaaatttcaaagatcaagtcattttgctgaataagcatattgacgcatacaaaacattcccaccaacagagcctaaaaaggacaaaaagaagaaggctgatgaaactcaagccttaccgcagagacagaagaaacagcaaactgtgactcttcttcctgctgcagatttggatgatttctccaaacaattgcaacaatccatgagcagtgctgactcaactcaggcctaaactcatgcagaccacacaaggcagatgggctatataaacgttttcgcttttccgtttacgatatatagtctactcttgtgcagaatgaattctcgtaactacatagcacaagtagatgtagttaactttaatctcacatagcaatctttaatcagtgtgtaacattagggaggacttgaaagagccaccacattttcaccgaggccacgcggagtacgatcgagtgtacagtgaacaatgctagggagagctgcctatatggaagagccctaatgtgtaaaattaattttagtagtgctatccccatgtga

SEQ ID NO: 58 - DNA, 29810 bp, synthetic construct
  misc_feature 1..29810: note = Reconstituted virus 21
  source 1..29810: mol_type = other DNA
accaactttcgatctcttgtagatctgttctctaaacgaactttaaaatctgtgtggctgtcactcggctgcatgcttagtgcactcacgcagtataattaataactaattactgtcgttgacaggacacgagtaactcgtctatcttctgcaggctgcttacggtttcgtccgtgttgcagccgatcatcagcacatctaggttttgtccgggtgtgaccgaaaggtaagatggagagccttgtccctggtttcaacgagaaaacacacgtccaactcagtttgcctgttttacaggttcgcgacgtgctcgtacgtggctttggagactccgtggaggaggtcttatcagaggcacgtcaacatcttaaagatggcacttgtggcttagtagaagttgaaaaaggcgttttgcctcaacttgaacagccctatgtgttcatcaaacgttcggatgctcgaactgcacctcatggtcatgttatggttgagctggtagcagaactcgaaggcattcagtacggtcgtagtggtgagacacttggtgtccttgtccctcatgtgggcgaaataccagtggcttaccgcaaggttcttcttcgtaagaacggtaataaaggagctggtggccatagttacggcgccgatctaaagtcatttgacttaggcgacgagcttggcactgatccttatgaagattttcaagaaaactggaacactaaacatagcagtggtgttacccgtgaactcatgcgtgagcttaacggaggggcatacactcgctatgtcgataacaacttctgtggccctgatggctaccctcttgagtgcattaaagaccttctagcacgtgctggtaaagcttcatgcactttgtccgaacaactggactttattgacactaagaggggtgtatactgctgccgtgaacatgagcatgaaattgcttggtacacggaacgttctgaaaagagctatgaattgcagacaccttttgaaattaaattggcaaagaaatttgacaccttcaatggggaatgtccaaattttgtatttcccttaaattccataatcaagactattcaaccaagggttgaaaagaaaaagcttgatggctttatgggtagaattcgatctgtctatccagttgcgtcaccaaatgaatgcaaccaaatgtgcctttcaactctcatgaagtgtgatcattgtggtgaaacttcatggcagacgggcgattttgttaaagccacttgcgaattttgtggcactgagaatttgactaaagaaggtgccactacttgtggttacttaccccaaaatgctgttgttaaaatttattgtccagcatgtcacaattcagaagtaggacctgagcatagtcttgccgaataccataatgaatctggcttgaaaaccattcttcgtaagggtggtcgcactattgcctttggaggctgtgtgttctcttatgttggttgccataacaagtgtgcctattgggttccacgtgctagcgctaacataggttgtaaccatacaggtgttgttggagaaggttccgaaggtcttaatgacaaccttcttgaaatactccaaaaagagaaagtcaacatcaatattgttggtgactttaaacttaatgaagagatcgccattattttggcatctttttctgcttccacaagtgcttttgtggaaactgtgaaaggtttggattataaagcattcaaacaaattgttgaatcctgtggtaattttaaagttacaaaaggaaaagctaaaaaaggtgcctggaatattggtgaacagaaatcaatactgagtcctctttatgcatttgcatcagaggctgctcgtgttgtacgatcaattttctcccgcactcttgaaactgctcaaaattctgtgcgtgttttacagaaggccgctataacaatactagatggaatttcacagtattcactgagactcattgatgctatgatgttcacatctgatttggctactaacaatctagttgtaatggcctacattacaggtggtgttgttcagttgacttcgcagtggctaactaacatctttggcactgtttatgaaaaactcaaacccgtccttgattggcttgaagagaagtttaaggaaggtgtagagtttcttagagacggttgggaaattgttaaatttatctcaacctgtgcttgtgaaattgtcggtggacaaattgtcacctgtgcaaaggaaattaaggagagtgttcagacattctttaagcttgtaaataaatttttggctttgtgtgctgactctatcattattggtggagctaaacttaaagccttgaatttaggtgaaacatttgtcacgcactcaaagggattgtacagaaagtgtgttaaatccagagaagaaactggcctactcatgcctctaaaagccccaaaagaaattatcttcttagagggagaaacacttcccacagaagtgttaacagaggaagttgtcttgaaaactggtgatttacaaccattagaacaacctactagtgaagctgttgaagctccattggttggtacaccagtttgtattaacgggcttatgttgctcgaaatcaaagacacagaaaagtactgtgcccttgcacctaatatgatggtaacaaacaataccttcacactcaaaggcggtgcaccaacaaaggttacttttggtgatgacactgtgatagaagtgcaaggttacaagagtgtgaatatcacttttgaacttgatgaaaggattgataaagtacttaatgagaagtgctctgcctatacagttgaactcggtacagaagtaaatgagttcgcctgtgttgtggcagatgctgtcataaaaactttgcaaccagtatctgaattacttacaccactgggcattgatttagatgagtggagtatggctacatactacttatttgatgagtctggtgagtttaaattggcttcacatatgtattgttctttttaccctccagatgaggatgaagaagaaggtgattgtgaagaagaagagtttgagccatcaactcaatatgagtatggtactgaagatgattaccaaggtaaacctttggaatttggtgccacttctgctgctcttcaacctgaagaagagcaagaagaagattggttagatgatgatagtcaacaaactgttggtcaacaagacggcagtgaggacaatcagacaactactattcaaacaattgttgaggttcaacctcaattagagatggaacttacaccagttgttcagactattgaagtgaatagttttagtggttatttaaaacttactgacaatgtatacattaaaaatgcagacattgtggaagaagctaaaaaggtaaaaccaacagtggttgttaatgcagccaatgtttaccttaaacatggaggaggtgttgcaggagccttaaataaggctactaacaatgccatgcaagttgaatctgatgattacatagctactaatggaccacttaaagtgggtggtagttgtgttttaagcggacacaatcttgctaaacactgtcttcatgttgtcggcccaaatgttaacaaaggtgaagacattcaacttcttaagagtgcttatgaaaattttaatcagcacgaagttctacttgcaccattattatcagctggtatttttggtgctgaccctatacattctttaagagtttgtgtagatactgttcgcacaaatgtctacttagctgtctttgataaaaatctctatgacaaacttgtttcaagctttttggaaatgaagagtgaaaagcaagttgaacaaaagatcgctgagattcctaaagaggaagttaagccatttataactgaaagtaaaccttcagttgaacagagaaaacaagatgataagaaaatcaaagcttgtgttgaagaagttacaacaactctggaagaaactaagttcctcacagaaaacttgttactttatattgacattaatggcaatcttcatccagattctgccactcttgttagtgacattgacatcactttcttaaagaaagatgctccatatatagtgggtgatgttgttcaagagggtgttttaactgctgtggttatacctactaaaaaggctggtggcactactgaaatgctagcgaaagctttgagaaaagtgccaacagacaattatataaccacttacccgggtcagggtttaaatggttacactgtagaggaggcaaagacagtgcttaaaaagtgtaaaagtgccttttacattctaccatctattatctctaatgagaagcaagaaattcttggaactgtttcttggaatttgcgagaaatgcttgcacatgcagaagaaacacgcaaattaatgcctgtctgtgtggaaactaaagccatagtttcaactatacagcgtaaatataagggtattaaaatacaagagggtgtggttgattatggtgctagattttacttttacaccagtaaaacaactgtagcgtcacttatcaacacacttaacgatctaaatgaaactcttgttacaatgccacttggctatgtaacacatggcttaaatttggaagaagctgctcggtatatgagatctctcaaagtgccagctacagtttctgtttcttcacctgatgctgttacagcgtataatggttatcttacttcttcttctaaaacacctgaagaacattttattgaaaccatctcacttgctggttcctataaagattggtcctattctggacaatctacacaactaggtatagaatttcttaagagaggtgataaaagtgtatattacactagtaatcctaccacattccacctagatggtgaagttatcacctttgacaatcttaagacacttctttctttgagagaagtgaggactattaaggtgtttacaacagtagacaacattaacctccacacgcaagttgtggacatgtcaatgacatatggacaacagtttggtccaacttatttggatggagctgatgttactaaaataaaacctcataattcacatgaaggtaaaacattttatgttttacctaatgatgacactctacgtgttgaggcttttgagtactaccacacaactgatcctagttttctgggtaggtacatgtcagcattaaatcacactaaaaagtggaaatacccacaagttaatggtttaacttctattaaatgggcagataacaactgttatcttgccactgcattgttaacactccaacaaatagagttgaagtttaatccacctgctctacaagatgcttattacagagcaagggctggtgaagctgctaacttttgtgcacttatcttagcctactgtaataagacagtaggtgagttaggtgatgttagagaaacaatgagttacttgtttcaacatgccaatttagattcttgcaaaagagtcttgaacgtggtgtgtaaaacttgtggacaacagcagacaacccttaagggtgtagaagctgttatgtacatgggcacactttcttatgaacaatttaagaaaggtgttcagataccttgtacgtgtggtaaacaagctacaaaatatctagtacaacaggagtcaccttttgttatgatgtcagcaccacctgctcagtatgaacttaagcatggtacatttacttgtgctagtgagtacactggtaattaccagtgtggtcactataaacatataacttctaaagaaactttgtattgcatagacggtgctttacttacaaagtcctcagaatacaaaggtcctattacggatgttttctacaaagaaaacagttacacaacaaccataaaaccagttacttataaattggatggtgttgtttgtacagaaattgaccctaagttggacaattattataagaaagacaattcttatttcacagagcaaccaattgatcttgtaccaaaccaaccatatccaaacgcaagcttcgataattttaagtttgtatgtgataatatcaaatttgctgatgatttaaaccagttaactggttataagaaacctgcttcaagagagcttaaagttacatttttccctgacttaaatggtgatgtggtggctattgattataaacactacacaccctcttttaagaaaggagctaaattgttacataaacctattgtttggcatgttaacaatgcaactaataaagccacgtataaaccaaatacctggtgtatacgttgtctttggagcacaaaaccagttgaaacatcaaattcgtttgatgtactgaagtcagaggacgcgcagggaatggataatcttgcctgcgaagatctaaaaccagtctctgaagaagtagtggaaaatcctaccatacagaaagacgttcttgagtgtaatgtgaaaactaccgaagttgtaggagacattatacttaaaccagcaaataatagtttaaaaattacagaagaggttggccacacagatctaatggctgcttatgtagacaattctagtcttactattaagaaacctaatgaattatctagagtattaggtttgaaaacccttgctactcatggtttagctgctgttaatagtgtcccttgggatactatagctaattatgctaagccttttcttaacaaagttgttagtacaactactaacatagttacacggtgtttaaaccgtgtttgtactaattatatgccttatttctttactttattgctacaattgtgtacttttactagaagtacaaattctagaattaaagcatctatgccgactactatagcaaagaatactgttaagagtgtcggtaaattttgtctagaggcttcatttaattatttgaagtcacctaatttttctaaactgataaatattataatttggtttttactattaagtgtttgcctaggttctttaatctactcaaccgctgctttaggtgttttaatgtctaatttaggcatgccttcttactgtactggttacagagaaggctatttgaactctactaatgtcactattgcaacctactgtactggttctataccttgtagtgtttgtcttagtggtttagattctttagacacctatccttctttagaaactatacaaattaccatttcatcttttaaatgggatttaactgcttttggcttagttgcagagtggtttttggcatatattcttttcactaggtttttctatgtacttggattggctgcaatcatgcaattgtttttcagctattttgcagtacattttattagtaattcttggcttatgtggttaataattaatcttgtacaaatggccccgatttcagctatggttagaatgtacatcttctttgcatcattttattatgtatggaaaagttatgtgcatgttgtagacggttgtaattcatcaacttgtatgatgtgttacaaacgtaatagagcaacaagagtcgaatgtacaactattgttaatggtgttagaaggtccttttatgtctatgctaatggaggtaaaggcttttgcaaactacacaattggaattgtgttaattgtgatacattctgtgctggtagtacatttattagtgatgaagttgcgagagacttgtcactacagtttaaaagaccaataaatcctactgaccagtcttcttacatcgttgatagtgttacagtgaagaatggttccatccatctttactttgataaagctggtcaaaagacttatgaaagacattctctctctcattttgttaacttagacaacctgagagctaataacactaaaggttcattgcctattaatgttatagtttttgatggtaaatcaaaatgtgaagaatcatctgcaaaatcagcgtctgtttactacagtcagcttatgtgtcaacctatactgttactagatcaggcattagtgtctgatgttggtgatagtgcggaagttgcagttaaaatgtttgatgcttacgttaatacgttttcatcaacttttaacgtaccaatggaaaaactcaaaacactagttgcaactgcagaagctgaacttgcaaagaatgtgtccttagacaatgtcttatctacttttatttcagcagctcggcaagggtttgttgattcagatgtagaaactaaagatgttgttgaatgtcttaaattgtcacatcaatctgacatagaagttactggcgatagttgtaataactatatgctcacctataacaaagttgaaaacatgacaccccgtgaccttggtgcttgtattgactgtagtgcgcgtcatattaatgcgcaggtagcaaaaagtcacaacattgctttgatatggaacgttaaagatttcatgtcattgtctgaacaactacgaaaacaaatacgtagtgctgctaaaaagaataacttaccttttaagttgacatgtgcaactactagacaagttgttaatgttgtaacaacaaagatagcacttaagggtggtaaaattgttaataattggttgaagcagttaattaaagttacacttgtgttcctttttgttgctgctattttctatttaataacacctgttcatgtcatgtctaaacatactgacttttcaagtgaaatcataggatacaaggctattgatggtggtgtcactcgtgacatagcatctacagatacttgttttgctaacaaacatgctgattttgacacatggtttagccagcgtggtggtagttatactaatgacaaagcttgcccattgattgctgcagtcataacaagagaagtgggttttgtcgtgcctggtttgcctggcacgatattacgcacaactaatggtgactttttgcatttcttacctagagtttttagtgcagttggtaacatctgttacacaccatcaaaacttatagagtacactgactttgcaacatcagcttgtgttttggctgctgaatgtacaatttttaaagatgcttctggtaagccagtaccatattgttatgataccaatgtactagaaggttctgttgcttatgaaagtttacgccctgacacacgttatgtgctcatggatggctctattattcaatttcctaacacctaccttgaaggttctgttagagtggtaacaacttttgattctgagtactgtaggcacggcacttgtgaaagatcagaagctggtgtttgtgtatctactagtggtagatgggtacttaacaatgattattacagatctttaccaggagttttctgtggtgtagatgctgtaaatttacttactaatatgtttacaccactaattcaacctattggtgctttggacatatcagcatctatagtagctggtggtattgtagctatcgtagtaacatgccttgcctactattttatgaggtttagaagagcttttggtgaatacagtcatgtagttgcctttaatactttactattccttatgtcattcactgtactctgtttaacaccagtttactcattcttacctggtgtttattctgttatttacttgtacttgacattttatcttactaatgatgtttcttttttagcacatattcagtggatggttatgttcacacctttagtacctttctggataacaattgcttatatcatttgtatttccacaaagcatttctattggttctttagtaattacctaaagagacgtgtagtctttaatggtgtttcctttagtacttttgaagaagctgcgctgtgcacctttttgttaaataaagaaatgtatctaaagttgcgtagtgatgtgctattacctcttacgcaatataatagatacttagctctttataataagtacaagtattttagtggagcaatggatacaactagctacagagaagctgcttgttgtcatctcgcaaaggctctcaatgacttcagtaactcaggttctgatgttctttaccaaccaccacaaacctctatcacctcagctgttttgcagagtggttttagaaaaatggcattcccatctggtaaagttgagggttgtatggtacaagtaacttgtggtacaactacacttaacggtctttggcttgatgacgtagtttactgtccaagacatgtgatctgcacctctgaagacatgcttaaccctaattatgaagatttactcattcgtaagtctaatcataatttcttggtacaggctggtaatgttcaactcagggttattggacattctatgcaaaattgtgtacttaagcttaaggttgatacagccaatcctaagacacctaagtataagtttgttcgcattcaaccaggacagactttttcagtgttagcttgttacaatggttcaccatctggtgtttaccaatgtgctatgaggcccaatttcactattaagggttcattccttaatggttcatgtggtagtgttggttttaacatagattatgactgtgtctctttttgttacatgcaccatatggaattaccaactggagttcatgctggcacagacttagaaggtaacttttatggaccttttgttgacaggcaaacagcacaagcagctggtacggacacaactattacagttaatgttttagcttggttgtacgctgctgttataaatggagacaggtggtttctcaatcgatttaccacaactcttaatgactttaaccttgtggctatgaagtacaattatgaacctctaacacaagaccatgttgacatactaggacctctttctgctcaaactggaattgccgttttagatatgtgtgcttcattaaaagaattactgcaaaatggtatgaatggacgtaccatattgggtagtgctttattagaagatgaatttacaccttttgatgttgttagacaatgctcaggtgttactttccaaagtgcagtgaaaagaacaatcaagggtacacaccactggttgttactcacaattttgacttcacttttagttttagtccagagtactcaatggtctttgttcttttttttgtatgaaaatgcctttttaccttttgctatgggtattattgctatgtctgcttttgcaatgatgtttgtcaaacataagcatgcatttctctgtttgtttttgttaccttctcttgccactgtagcttattttaatatggtctatatgcctgctagttgggtgatgcgtattatgacatggttggatatggttgatactagtttgtctggttttaagctaaaagactgtgttatgtatgcatcagctgtagtgttactaatccttatgacagcaagaactgtgtatgatgatggtgctaggagagtgtggacacttatgaatgtcttgacactcgtttataaagtttattatggtaatgctttagatcaagccatttccatgtgggctcttataatctctgttacttctaactactcaggtgtagttacaactgtcatgtttttggccagaggtattgtttttatgtgtgttgagtattgccctattttcttcataactggtaatacacttcagtgtataatgctagtttattgtttcttaggctatttttgtacttgttactttggcctcttttgtttactcaaccgctactttagactgactcttggtgtttatgattacttagtttctacacaggagtttagatatatgaattcacagggactactcccacccaagaatagcatagatgccttcaaactcaacattaaattgttgggtgttggtggcaaaccttgtatcaaagtagccactgtacagtctaaaatgtcagatgtaaagtgcacatcagtagtcttactctcagttttgcaacaactcagagtagaatcatcatctaaattgtgggctcaatgtgtccagttacacaatgacattctcttagctaaagatactactgaagcctttgaaaaaatggtttcactactttctgttttgctttccatgcagggtgctgtagacataaacaagctttgtgaagaaatgctggacaacagggcaaccttacaagctatagcctcagagtttagttcccttccatcatatgcagcttttgctactgctcaagaagcttatgagcaggctgttgctaatggtgattctgaagttgttcttaaaaagttgaagaagtctttgaatgtggctaaatctgaatttgaccgtgatgcagccatgcaacgtaagttggaaaagatggctgatcaagctatgacccaaatgtataaacaggctagatctgaggacaagagggcaaaagttactagtgctatgcagacaatgcttttcactatgcttagaaagttggataatgatgcactcaacaacattatcaacaatgcaagagatggttgtgttcccttgaacataatacctcttacaacagcagccaaactaatggttgtcataccagactataacacatataaaaatacgtgtgatggtacaacatttacttatgcatcagcattgtgggaaatccaacaggttgtagatgcagatagtaaaattgttcaacttagtgaaattagtatggacaattcacctaatttagcatggcctcttattgtaacagctttaagggccaattctgctgtcaaattacagaataatgagcttagtcctgttgcactacgacagatgtcttgtgctgccggtactacacaaactgcttgcactgatgacaatgcgttagcttactacaacacaacaaagggaggtaggtttgtacttgcactgttatccgatttacaggatttgaaatgggctagattccctaagagtgatggaactggtactatctatacagaactggaaccaccttgtaggtttgttacagacacacctaaaggtcctaaagtgaagtatttatactttattaaaggattaaacaacctaaatagaggtatggtacttggtagtttagctgccacagtacgtctacaagctggtaatgcaacagaagtgcctgccaattcaactgtattatctttctgtgcttttgctgtagatgctgctaaagcttacaaagattatctagctagtgggggacaaccaatcactaattgtgttaagatgttgtgtacacacactggtactggtcaggcaataacagttacaccggaagccaatatggatcaagaatcctttggtggtgcatcgtgttgtctgtactgccgttgccacatagatcatccaaatcctaaaggattttgtgacttaaaaggtaagtatgtacaaatacctacaacttgtgctaatgaccctgtgggttttacacttaaaaacacagtctgtaccgtctgcggtatgtggaaaggttatggctgtagttgtgatcaactccgcgaacccatgcttcagtcagctgatgcacaatcgtttttaaacgggtttgcggtgtaagtgcagcccgtcttacaccgtgcggcacaggcactagtactgatgtcgtatacagggcttttgacatctacaatgataaagtagctggttttgctaaattcctaaaaactaattgttgtcgcttccaagaaaaggacgaagatgacaatttaattgattcttactttgtagttaagagacacactttctctaactaccaacatgaagaaacaatttataatttacttaaggattgtccagctgttgctaaacatgacttctttaagtttagaatagacggtgacatggtaccacatatatcacgtcaacgtcttactaaatacacaatggcagacctcgtctatgctttaaggcattttgatgaaggtaattgtgacacattaaaagaaatacttgtcacatacaattgttgtgatgatgattatttcaataaaaaggactggtatgattttgtagaaaacccagatatattacgcgtatacgccaacttaggtgaacgtgtacgccaagctttgttaaaaacagtacaattctgtgatgccatgcgaaatgctggtattgttggtgtactgacattagataatcaagatctcaatggtaactggtatgatttcggtgatttcatacaaaccacgccaggtagtggagttcctgttgtagattcttattattcattgttaatgcctatattaaccttgaccagggctttaactgcagagtcacatgttgacactgacttaacaaagccttacattaagtgggatttgttaaaatatgacttcacggaagagaggttaaaactctttgaccgttattttaaatattgggatcagacataccacccaaattgtgttaactgtttggatgacagatgcattctgcattgtgcaaactttaatgttttattctctacagtgttcccacttacaagttttggaccactagtgagaaaaatatttgttgatggtgttccatttgtagtttcaactggataccacttcagagagctaggtgttgtacataatcaggatgtaaatttacatagctctagacttagttttaaggaattacttgtgtatgctgctgaccctgctatgcacgctgcttctggtaatctattactagataaacgcactacgtgcttttcagtagctgcacttactaacaatgttgcttttcaaactgtcaaacccggtaattttaacaaagacttctatgactttgctgtgtctaagggtttctttaaggaaggaagttctgttgaattaaaacacttcttctttgctcaggatggtaatgctgctatcagcgattatgactactatcgttataatctaccaacaatgtgtgatatcagacaactactatttgtagttgaagttgttgataagtactttgattgttacgatggtggctgtattaatgctaaccaagtcatcgtcaacaacctagacaaatcagctggttttccatttaataaatggggtaaggctagactttattatgattcaatgagttatgaggatcaagatgcacttttcgcatatacaaaacgtaatgtcatccctactataactcaaatgaatcttaagtatgccattagtgcaaagaatagagctcgcaccgtagctggtgtctctatctgtagtactatgaccaatagacagtttcatcaaaaattattgaaatcaatagccgccactagaggagctactgtagtaattggaacaagcaaattctatggtggttggcacaacatgttaaaaactgtttatagtgatgtagaaaaccctcaccttatgggttgggattatcctaaatgtgatagagccatgcctaatatgcttagaattatggcctcacttgttcttgctcgcaaacatacaacgtgttgtagcttgtcacaccgtttctatagattagctaatgagtgtgctcaagtattgagtgaaatggtcatgtgtggcggttcactatatgttaaaccaggtggaacctcatcaggagatgccacaactgcttatgctaatagtgtttttaacatttgtcaagctgtcacggccaatgttaatgcacttttatctactgatggtaacaaaattgccgataagtatgtccgcaatttacaacacagactttatgagtgtctctatagaaatagagatgttgacacagactttgtgaatgagttttacgcatatttgcgtaaacatttctcaatgatgatactctctgacgatgctgttgtgtgtttcaatagcacttatgcatctcaaggtctagtggctagcataaagaactttaagtcagttctttattatcaaaacaatgtttttatgtctgaagcaaaatgttggactgagactgaccttactaaaggacctcatgaattttgctctcaacatacaatgctagttaaacagggtgatgattatgtgtaccttccttacccagatccatcaagaatcctaggggccggctgttttgtagatgatatcgtaaaaacagatggtacacttatgattgaacggttcgtgtctttagctatagatgcttacccacttactaaacatcctaatcaggagtatgctgatgtctttcatttgtacttacaatacataagaaagctacatgatgagttaacaggacacatgttagacatgtattctgttatgcttactaatgataacacttcaaggtattgggaacctgagttttatgaggctatgtacacaccgcatacagtcttacaggctgttggggcttgtgttctttgcaattcacagacttcattaagatgtggtgcttgcatacgtagaccattcttatgttgtaaatgctgttacgaccatgtcatatcaacatcacataaattagtcttgtctgttaatccgtatgtttgcaatgctccaggttgtgatgtcacagatgtgactcaactttacttaggaggtatgagctattattgtaaatcacataaaccacccattagttttccattgtgtgctaatggacaagtttttggtttatataaaaatacatgtgttggtagcgataatgttactgactttaatgcaattgcaacatgtgactggacaaatgctggtgattacattttagctaacacctgtactgaaagactcaagctttttgcagcagaaacgctcaaagctactgaggagacatttaaactgtcttatggtattgctactgtacgtgaagtgctgtctgacagagaattacatctttcatgggaagttggtaaacctagaccaccacttaaccgaaattatgtctttactggttatcgtgtaactaaaaacagtaaagtacaaataggagagtacacctttgaaaaaggtgactatggtgatgctgttgtttaccgaggtacaacaacttacaaattaaatgttggtgattattttgtgctgacatcacatacagtaatgccattaagtgcacctacactagtgccacaagagcactatgttagaattactggcttatacccaacactcaatatctcagatgagttttctagcaatgttgcaaattatcaaaaggttggtatgcaaaagtattctacactccagggaccacctggtactggtaagagtcattttgctattggcctagctctctactacccttctgctcgcatagtgtatacagcttgctctcatgccgctgttgatgcactatgtgagaaggcattaaaatatttgcctatagataaatgtagtagaattatacctgcacgtgctcgtgtagagtgttttgataaattcaaagtgaattcaacattagaacagtatgtcttttgtactgtaaatgcattgcctgagacgacagcagatatagttgtctttgatgaaatttcaatggccacaaattatgatttgagtgttgtcaatgccagattacgtgctaagcactatgtgtacattggcgaccctgctcaattacctgcaccacgcacattgctaactaagggcacactagaaccagaatatttcaattcagtgtgtagacttatgaaaactataggtccagacatgttcctcggaacttgtcggcgttgtcctgctgaaattgttgacactgtgagtgctttggtttatgataataagcttaaagcacataaagacaaatcagctcaatgctttaaaatgttttataagggtgttatcacgcatgatgtttcatctgcaattaacaggccacaaataggcgtggtaagagaattccttacacgtaaccctgcttggagaaaagctgtctttatttcaccttataattcacagaatgctgtagcctcaaagattttgggactaccaactcaaactgttgattcatcacagggctcagaatatgactatgtcatattcactcaaaccactgaaacagctcactcttgtaatgtaaacagatttaatgttgctattaccagagcaaaagtaggcatactttgcataatgtctgatagagacctttatgacaagttgcaatttacaagtcttgaaattccacgtaggaatgtggcaactttacaagctgaaaatgtaacaggactctttaaagattgtagtaaggtaatcactgggttacatcctacacaggcacctacacacctcagtgttgacactaaattcaaaactgaaggtttatgtgttgacatacctggcatacctaaggacatgacctatagaagactcatctctatgatgggttttaaaatgaattatcaagttaatggttaccctaacatgtttatcacccgcgaagaagctataagacatgtacgtgcatggattggcttcgatgtcgaggggtgtcatgctactagagaagctgttggtaccaatttacctttacagctaggtttttctacaggtgttaacctagttgctgtacctacaggttatgttgatacacctaataatacagatttttccagagttagtgctaaaccaccgcctggagatcaatttaaacacctcataccacttatgtacaaaggacttccttggaatgtagtgcgtataaagattgtacaaatgttaagtgacacacttaaaaatctctctgacagagtcgtatttgtcttatgggcacatggctttgagttgacatctatgaagtattttgtgaaaataggacctgagcgcacctgttgtctatgtgatagacgtgccacatgcttttccactgcttcagacacttatgcctgttggcatcattctattggatttgattacgtctataatccgtttatgattgatgttcaacaatggggttttacaggtaacctacaaagcaaccatgatctgtattgtcaagtccatggtaatgcacatgtagctagttgtgatgcaatcatgactaggtgtctagctgtccacgagtgctttgttaagcgtgttgactggactattgaatatcctataattggtgatgaactgaagattaatgcggcttgtagaaaggttcaacacatggttgttaaagctgcattattagcagacaaattcccagttcttcacgacattggtaaccctaaagctattaagtgtgtacctcaagctgatgtagaatggaagttctatgatgcacagccttgtagtgacaaagcttataaaatagaagaattattctattcttatgccacacattctgacaaattcacagatggtgtatgcctattttggaattgcaatgtcgatagatatcctgctaattccattgtttgtagatttgacactagagtgctatctaaccttaacttgcctggttgtgatggtggcagtttgtatgtaaataaacatgcattccacacaccagcttttgataaaagtgcttttgttaatttaaaacaattaccatttttctattactctgacagtccatgtgagtctcatggaaaacaagtagtgtcagatatagattatgtaccactaaagtctgctacgtgtataacacgttgcaatttaggtggtgctgtctgtagacatcatgctaatgagtacagattgtatctcgatgcttataacatgatgatctcagctggctttagcttgtgggtttacaaacaatttgatacttataacctctggaacacttttacaagacttcagagtttagaaaatgtggcttttaatgttgtaaataagggacactttgatggacaacagggtgaagtaccagtttctatcattaataacactgtttacacaaaagttgatggtgttgatgtagaattgtttgaaaataaaacaacattacctgttaatgtagcatttgagctttgggctaagcgcaacattaaaccagtaccagaggtgaaaatactcaataatttgggtgtggacattgctgctaatactgtgatctgggactacaaaagagatgctccagcacatatatctactattggtgtttgttctatgactgacatagccaagaaaccaactgaaacgatttgtgcaccactcactgtcttttttgatggtagagttgatggtcaagtagacttatttagaaatgcccgtaatggtgttcttattacagaaggtagtgttaaaggtttacaaccatctgtaggtcccaaacaagctagtcttaatggagtcacattaattggagaagccgtaaaaacacagttcaattattataagaaagttgatggtgttgtccaacaattacctgaaacttactttactcagagtagaaatttacaagaatttaaacccaggagtcaaatggaaattgatttcttagaattagctatggatgaattcattgaacggtataaattagaaggctatgccttcgaacatatcgtttatggagattttagtcatagtcagttaggtggtttacatctactgattggactagctaaacgttttaaggaatcaccttttgaattagaagattttattcctatggacagtacagttaaaaactatttcataacagatgcgcaaacaggttcatctaagtgtgtgtgttctgttattgatttattacttgatgattttgttgaaataataaaatcccaagatttatctgtagtttctaaggttgtcaaagtgactattgactatacagaaatttcatttatgctttggtgtaaagatggccatgtagaaacattttacccaaaattacaatctagtcaagcgtggcaaccgggtgttgctatgcctaatctttacaaaatgcaaagaatgctattagaaaagtgtgaccttcaaaattatggtgatagtgcaacattacctaaaggcataatgatgaatgtcgcaaaatatactcaactgtgtcaatatttaaacacattaacattagctgtaccctataatatgagagttatacattttggtgctggttctgataaaggagttgcaccaggtacagctgttttaagacagtggttgcctacgggtacgctgcttgtcgactcagatcttaatgactttgtctctgatgcagattcaactttgattggtgattgtgcaactgtacatacagctaataaatgggatctcattattagtgatatgtacgaccctaagactaaaaatgttacaaaagaaaatgactctaaagagggttttttcacttacatttgtgggtttatacaacaaaagctagctcttggaggttccgtggctataaagataacagaacattcttggaatgctgatctttataagctcatgggacacttcgcatggtggacagcctttgttactaatgtgaatgcgtcatcatctgaagcatttttaattggatgtaattatcttggcaaaccacgcgaacaaatagatggttatgtcatgcatgcaaattacatattttggaggaatacaaatccaattcagttgtcttcctattctttatttgacatgagtaaatttccccttaaattaaggggtactgctgttatgtctttaaaagaaggtcaaatcaatgatatgattttatctcttcttagtaaaggtagacttataattagagaaaacaacagagttgttatttctagtgatgttcttgttaacaactaaacgaacaatgtttgtttttcttgttttattgccactagtctctagtcagtgtgttaatcttacaaccagaactcaattaccccctgcatacactaattctttcacacgtggtgtttattaccctgacaaagttttcagatcctcagttttacattcaactcaggacttgttcttacctttcttttccaatgttacttggttccatgctatacatgtctctgggaccaatggtactaagaggtttgataaccctgtcctaccatttaatgatggtgtttattttgcttccactgagaagtctaacataataagaggctggatttttggtactactttagattcgaagacccagtccctacttattgttaataacgctactaatgttgttattaaagtctgtgaatttcaattttgtaatgatccatttttgggtgtttattaccacaaaaacaacaaaagttggatggaaagtgagttcagagtttattctagtgcgaataattgcacttttgaatatgtctctcagccttttcttatggaccttgaaggaaaacagggtaatttcaaaaatcttagggaatttgtgtttaagaatattgatggttattttaaaatatattctaagcacacgcctattaatttagtgcgtgatctccctcagggtttttcggctttagaaccattggtagatttgccaataggtattaacatcactaggtttcaaactttacttgctttacatagaagttatttgactcctggtgattcttcttcaggttggacagctggtgctgcagcttattatgtgggttatcttcaacctaggacttttctattaaaatataatgaaaatggaaccattacagatgctgtagactgtgcacttgaccctctctcagaaacaaagtgtacgttgaaatccttcactgtagaaaaaggaatctatcaaacttctaactttagagtccaaccaacagaatctattgttagatttcctaatattacaaacttgtgcccttttggtgaagtttttaacgccaccagatttgcatctgtttatgcttggaacaggaagagaatcagcaactgtgttgctgattattctgtcctatataattccgcatcattttccacttttaagtgttatggagtgtctcctactaaattaaatgatctctgctttactaatgtctatgcagattcatttgtaattagaggtgatgaagtcagacaaatcgctccagggcaaactggaaagattgctgattataattataaattaccagatgattttacaggctgcgttatagcttggaattctaacaatcttgattctaaggttggtggtaattataattacctgtatagattgtttaggaagtctaatctcaaaccttttgagagagatatttcaactgaaatctatcaggccggtagcacaccttgtaatggtgttgaaggttttaattgttactttcctttacaatcatatggtttccaacccactaatggtgttggttaccaaccatacagagtagtagtactttcttttgaacttctacatgcaccagcaactgtttgtggacctaaaaagtctactaatttggttaaaaacaaatgtgtcaatttcaacttcaatggtttaacaggcacaggtgttcttactgagtctaacaaaaagtttctgcctttccaacaatttggcagagacattgctgacactactgatgctgtccgtgatccacagacacttgagattcttgacattacaccatgttcttttggtggtgtcagtgttataacaccaggaacaaatacttctaaccaggttgctgttctttatcagggtgttaactgcacagaagtccctgttgctattcatgcagatcaacttactcctacttggcgtgtttattctacaggttctaatgtttttcaaacacgtgcaggctgtttaataggggctgaacatgtcaacaactcatatgagtgtgacatacccattggtgcaggtatatgcgctagttatcagactcagactaattctcctcggcgggcacgtagtgtagctagtcaatccatcattgcctacactatgtcacttggtgcagaaaattcagttgcttactctaataactctattgccatacccacaaattttactattagtgttaccacagaaattctaccagtgtctatgaccaagacatcagtagattgtacaatgtacatttgtggtgattcaactgaatgcagcaatcttttgttgcaatatggcagtttttgtacacaattaaaccgtgctttaactggaatagctgttgaacaagacaaaaacacccaagaagtttttgcacaagtcaaacaaatttacaaaacaccaccaattaaagattttggtggttttaatttttcacaaatattaccagatccatcaaaaccaagcaagaggtcatttattgaagatctacttttcaacaaagtgacacttgcagatgctggcttcatcaaacaatatggtgattgccttggtgatattgctgctagagacctcatttgtgcacaaaagtttaacggccttactgttttgccacctttgctcacagatgaaatgattgctcaatacacttctgcactgttagcgggtacaatcacttctggttggacctttggtgcaggtgctgcattacaaataccatttgctatgcaaatggcttataggtttaatggtattggagttacacagaatgttctctatgagaaccaaaaattgattgccaaccaatttaatagtgctattggcaaaattcaagactcactttcttccacagcaagtgcacttggaaaacttcaagatgtggtcaaccaaaatgcacaagctttaaacacgcttgttaaacaacttagctccaattttggtgcaatttcaagtgttttaaatgatatcctttcacgtcttgacaaagttgaggctgaagtgcaaattgataggttgatcacaggcagacttcaaagtttgcagacatatgtgactcaacaattaattagagctgcagaaatcagagcttctgctaatcttgctgctactaaaatgtcagagtgtgtacttggacaatcaaaaagagttgatttttgtggaaagggctatcatcttatgtccttccctcagtcagcacctcatggtgtagtcttcttgcatgtgacttatgtccctgcacaagaaaagaacttcacaactgctcctgccatttgtcatgatggaaaagcacactttcctcgtgaaggtgtctttgtttcaaatggcacacactggtttgtaacacaaaggaatttttatgaaccacaaatcattactacagacaacacatttgtgtctggtaactgtgatgttgtaataggaattgtcaacaacacagtttatgatcctttgcaacctgaattagactcattcaaggaggagttagataaatattttaagaatcatacatcaccagatgttgatttaggtgacatctctggcattaatgcttcagttgtaaacattcaaaaagaaattgaccgcctcaatgaggttgccaagaatttaaatgaatctctcatcgatctccaagaacttggaaagtatgagcagtatataaaatggccatggtacatttggctaggttttatagctggcttgattgccatagtaatggtgacaattatgctttgctgtatgaccagttgctgtagttgtctcaagggctgttgttcttgtggatcctgctgcaaatttgatgaagacgactctgagccagtgctcaaaggagtcaaattacattacacataaacgaacttatggatttgtttatgagaatcttcacaattggaactgtaactttgaagcaaggtgaaatcaaggatgctactccttcagattttgttcgcgctactgcaacgataccgatacaagcctcactccctttcggatggcttattgttggcgttgcacttcttgctgtttttcagagcgcttccaaaatcataaccctcaaaaagagatggcaactagcactctccaagggtgttcactttgtttgcaacttgctgttgttgtttgtaacagtttactcacaccttttgctcgttgctgctggccttgaagccccttttctctatctttatgctttagtctacttcttgcagagtataaactttgtaagaataataatgaggctttggctttgctggaaatgccgttccaaaaacccattactttatgatgccaactattttctttgctggcatactaattgttacgactattgtataccttacaatagtgtaacttcttcaattgtcattacttcaggtgatggcacaacaagtcctatttctgaacatgactaccagattggtggttatactgaaaaatgggaatctggagtaaaagactgtgttgtattacacagttacttcacttcagactattaccagctgtactcaactcaattgagtacagacactggtgttgaacatgttaccttcttcatctacaataaaattgttgatgagcctgaagaacatgtccaaattcacacaatcgacggttcatccggagttgttaatccagtaatggaaccaatttatgatgaaccgacgacgactactagcgtgcctttgtaagcacaagctgatgagtacgaacttatgtactcattcgtttcggaagagacaggtacgttaatagttaatagcgtacttctttttcttgctttcgtggtattcttgctagttacactagccatccttactgcgcttcgattgtgtgcgtactgctgcaatattgttaacgtgagtcttgtaaaaccttctttttacgtttactctcgtgttaaaaatctgaattcttctagagttcctgatcttccggtctaaacgaactaaatattatattagtttttctgtttggaactttaattttagccatggcagattccaacggtactattaccgttgaagagcttaaaaagctccttgaacaatggaacctagtaataggtttcctattccttacatggatttgtcttctacaatttgcctatgccaacaggaataggtttttgtatataattaagttaattttcctctggctgttatggccagtaactttagcttgttttgtgcttgctgctgtttacagaataaattggatcaccggtggaattgctatcgcaatggcttgtcttgtaggcttgatgtggctcagctacttcattgcttctttcagactgtttgcgcgtacgcgttccatgtggtcattcaatccagaaactaacattcttctcaacgtgccactccatggcactattctgaccagaccgcttctagaaagtgaactcgtaatcggagctgtgatccttcgtggacatcttcgtattgctggacaccatctaggacgctgtgacatcaaggacctgcctaaagaaatcactgttgctacatcacgaacgctttcttattacaaattgggagcttcgcagcgtgtagcaggtgactcaggttttgctgcatacagtcgctacaggattggcaactataaattaaacacagaccattccagtagcagtgacaatattgctttgcttgtacagtaagtgacaacagatgtttcatctcgttgactttcaggttactatagcagagatattactaattattatgaggacttttaaagtttccatttggaatcttgattacatcataaacctcataattaaaaatttatctaagtcactaactgagaataaatattctcaattagatgaagagcaaccaatggagattgattaaacgaacatgaaaattattcttttcttggcactgataacactcgctacttgtgagctttatcactaccaagagtgtgttagaggtacaacagtacttttaaaagaaccttgctcttctggaacatacgagggcaattcaccatttcatcctctagctgataacaaatttgcactgacttgctttagcactcaatttgcttttgcttgtcctgacggcgtaaaacacgtctatcagttacgtgccagatcagtttcacctaaactgttcatcagacaagaggaagttcaagaactttactctccaatttttcttattgttgcggcaatagtgtttataacactttgcttcacactcaaaagaaagacagaatgattgaactttcattaattgacttctatttgtgctttttagcctttctgctattccttgttttaattatgcttattatcttttggttctcacttgaactgcaagatcataatgaaacttgtcacgcctaaacgaacatgaaatttcttgttttcttaggaatcatcacaactgtagctgcatttcaccaagaatgtagtttacagtcatgtactcaacatcaaccatatgtagttgatgacccgtgtcctattcacttctattctaaatggtatattagagtaggagctagaaaatcagcacctttaattgaattgtgcgtggatgaggctggttctaaatcacccattcagtacatcgatatcggtaattatacagtttcctgtttaccttttacaattaattgccaggaacctaaattgggtagtcttgtagtgcgttgttcgttctatgaagactttttagagtatcatgacgttcgtgttgttttagatttcatctaaacgaacaaactaaaatgtctgataatggaccccaaaatcagcgaaatgcaccccgcattacgtttggtggaccctcagattcaactggcagtaaccagaatggagaacgcagtggggcgcgatcaaaacaacgtcggccccaaggtttacccaataatactgcgtcttggttcaccgctctcactcaacatggcaaggaagaccttaaattccctcgaggacaaggcgttccaattaacaccaatagcagtccagatgaccaaattggctactaccgaagagctaccagacgaattcgtggtggtgacggtaaaatgaaagatctcagtccaagatggtatttctactacctaggaactgggccagaagctggacttccctatggtgctaacaaagacggcatcatatgggttgcaactgagggagccttgaatacaccaaaagatcacattggcacccgcaatcctgctaacaatgctgcaatcgtgctacaacttcctcaaggaacaacattgccaaaaggcttctacgcagaagggagcagaggcggcagtcaagcctcttctcgttcctcatcacgtagtcgcaacagttcaagaaattcaactccaggcagcagtaggggaacttctcctgctagaatggctggcaatggcggtgatgctgctcttgctttgctgctgcttgacagattgaaccagcttgagagcaaaatgtctggtaaaggccaacaacaacaaggccaaactgtcactaagaaatctgctgctgaggcttctaagaagcctcggcaaaaacgtactgccactaaagcatacaatgtaacacaagctttcggcagacgtggtccagaacaaacccaaggaaattttggggaccaggaactaatcagacaaggaactgattacaaacattggccgcaaattgcacaatttgcccccagcgcttcagcgttcttcggaatgtcgcgcattggcatggaagtcacaccttcgggaacgtggttgacctacacaggtgccatcaaattggatgacaaagatccaaatttcaaagatcaagtcattttgctgaataagcatattgacgcatacaaaacattcccaccaacagagcctaaaaaggacaaaaagaagaaggctgatgaaactcaagccttaccgcagagacagaagaaacagcaaactgtgactcttcttcctgctgcagatttggatgatttctccaaacaattgcaacaatccatgagcagtgctgactcaactcaggcctaaactcatgcagaccacacaaggcagatgggctatataaacgttttcgcttttccgtttacgatatatagtctactcttgtgcagaatgaattctcgtaactacatagcacaagtagatgtagttaactttaatctcacatagcaatctttaatcagtgtgtaacattagggaggacttgaaagagccaccacattttcaccgaggccacgcggagtacgatcgagtgtacagtgaacaatgctagggagagctgcctatatggaagagccctaatgtgtaaaattaattttagtagtgctatccccatgtga

SEQ ID NO: 59 - DNA, 29805 bp, synthetic construct
  misc_feature 1..29805: note = Reconstituted virus 22
  source 1..29805: mol_type = other DNA
actttcgatctcttgtagatctgttctctaaacgaactttaaaatctgtgtggctgtcactcggctgcatgcttagtgcactcacgcagtataattaataactaattactgtcgttgacaggacacgagtaactcgtctatcttctgcaggctgcttacggtttcgtccgtgttgcagccgatcatcagcacatctaggttttgtccgggtgtgaccgaaaggtaagatggagagccttgtccctggtttcaacgagaaaacacacgtccaactcagtttgcctgttttacaggttcgcgacgtgctcgtacgtggctttggagactccgtggaggaggtcttatcagaggcacgtcaacatcttaaagatggcacttgtggcttagtagaagttgaaaaaggcgttttgcctcaacttgaacagccctatgtgttcatcaaacgttcggatgctcgaactgcacctcatggtcatgttatggttgagctggtagcagaactcgaaggcattcagtacggtcgtagtggtgagacacttggtgtccttgtccctcatgtgggcgaaataccagtggcttaccgcaaggttcttcttcgtaagaacggtaataaaggagctggtggccatagttacggcgccgatctaaagtcatttgacttaggcgacgagcttggcactgatccttatgaagattttcaagaaaactggaacactaaacatagcagtggtgttacccgtgaactcatgcgtgagcttaacggaggggcatacactcgctatgtcgataacaacttctgtggccctgatggctaccctcttgagtgcattaaagaccttctagcacgtgctggtaaagcttcatgcactttgtccgaacaactggactttattgacactaagaggggtgtatactgctgccgtgaacatgagcatgaaattgcttggtacacggaacgttctgaaaagagctatgaattgcagacaccttttgaaattaaattggcaaagaaatttgacaccttcaatggggaatgtccaaattttgtatttcccttaaattccataatcaagactattcaaccaagggttgaaaagaaaaagcttgatggctttatgggtagaattcgatctgtctatccagttgcgtcaccaaatgaatgcaaccaaatgtgcctttcaactctcatgaagtgtgatcattgtggtgaaacttcatggcagacgggcgattttgttaaagccacttgcgaattttgtggcactgagaatttgactaaagaaggtgccactacttgtggttacttaccccaaaatgctgttgttaaaatttattgtccagcatgtcacaattcagaagtaggacctgagcatagtcttgccgaataccataatgaatctggcttgaaaaccattcttcgtaagggtggtcgcactattgcctttggaggctgtgtgttctcttatgttggttgccataacaagtgtgcctattgggttccacgtgctagcgctaacataggttgtaaccatacaggtgttgttggagaaggttccgaaggtcttaatgacaaccttcttgaaatactccaaaaagagaaagtcaacatcaatattgttggtgactttaaacttaatgaagagatcgccattattttggcatctttttctgcttccacaagtgcttttgtggaaactgtgaaaggtttggattataaagcattcaaacaaattgttgaatcctgtggtaattttaaagttacaaaaggaaaagctaaaaaaggtgcctggaatattggtgaacagaaatcaatactgagtcctctttatgcatttgcatcagaggctgctcgtgttgtacgatcaattttctcccgcactcttgaaactgctcaaaattctgtgcgtgttttacagaaggccgctataacaatactagatggaatttcacagtattcactgagactcattgatgctatgatgttcacatctgatttggctactaacaatctagttgtaatggcctacattacaggtggtgttgttcagttgacttcgcagtggctaactaacatctttggcactgtttatgaaaaactcaaacccgtccttgattggcttgaagagaagtttaaggaaggtgtagagtttcttagagacggttgggaaattgttaaatttatctcaacctgtgcttgtgaaattgtcggtggacaaattgtcacctgtgcaaaggaaattaaggagagtgttcagacattctttaagcttgtaaataaatttttggctttgtgtgctgactctatcattattggtggagctaaacttaaagccttgaatttaggtgaaacatttgtcacgcactcaaagggattgtacagaaagtgtgttaaatccagagaagaaactggcctactcatgcctctaaaagccccaaaagaaattatcttcttagagggagaaacacttcccacagaagtgttaacagaggaagttgtcttgaaaactggtgatttacaaccattagaacaacctactagtgaagctgttgaagctccattggttggtacaccagtttgtattaacgggcttatgttgctcgaaatcaaagacacagaaaagtactgtgcccttgcacctaatatgatggtaacaaacaataccttcacactcaaaggcggtgcaccaacaaaggttacttttggtgatgacactgtgatagaagtgcaaggttacaagagtgtgaatatcacttttgaacttgatgaaaggattgataaagtacttaatgagaagtgctctgcctatacagttgaactcggtacagaagtaaatgagttcgcctgtgttgtggcagatgctgtcataaaaactttgcaaccagtatctgaattacttacaccactgggcattgatttagatgagtggagtatggctacatactacttatttgatgagtctggtgagtttaaattggcttcacatatgtattgttctttttaccctccagatgaggatgaagaagaaggtgattgtgaagaagaagagtttgagccatcaactcaatatgagtatggtactgaagatgattaccaaggtaaacctttggaatttggtgccacttctgctgctcttcaacctgaagaagagcaagaagaagattggttagatgatgatagtcaacaaactgttggtcaacaagacggcagtgaggacaatcagacaactactattcaaacaattgttgaggttcaacctcaattagagatggaacttacaccagttgttcagactattgaagtgaatagttttagtggttatttaaaacttactgacaatgtatacattaaaaatgcagacattgtggaagaagctaaaaaggtaaaaccaacagtggttgttaatgcagccaatgtttaccttaaacatggaggaggtgttgcaggagccttaaataaggctactaacaatgccatgcaagttgaatctgatgattacatagctactaatggaccacttaaagtgggtggtagttgtgttttaagcggacacaatcttgctaaacactgtcttcatgttgtcggcccaaatgttaacaaaggtgaagacattcaacttcttaagagtgcttatgaaaattttaatcagcacgaagttctacttgcaccattattatcagctggtatttttggtgctgaccctatacattctttaagagtttgtgtagatactgttcgcacaaatgtctacttagctgtctttgataaaaatctctatgacaaacttgtttcaagctttttggaaatgaagagtgaaaagcaagttgaacaaaagatcgctgagattcctaaagaggaagttaagccatttataactgaaagtaaaccttcagttgaacagagaaaacaagatgataagaaaatcaaagcttgtgttgaagaagttacaacaactctggaagaaactaagttcctcacagaaaacttgttactttatattgacattaatggcaatcttcatccagattctgccactcttgttagtgacattgacatcactttcttaaagaaagatgctccatatatagtgggtgatgttgttcaagagggtgttttaactgctgtggttatacctactaaaaaggctggtggcactactgaaatgctagcgaaagctttgagaaaagtgccaacagacaattatataaccacttacccgggtcagggtttaaatggttacactgtagaggaggcaaagacagtgcttaaaaagtgtaaaagtgccttttacattctaccatctattatctctaatgagaagcaagaaattcttggaactgtttcttggaatttgcgagaaatgcttgcacatgcagaagaaacacgcaaattaatgcctgtctgtgtggaaactaaagccatagtttcaactatacagcgtaaatataagggtattaaaatacaagagggtgtggttgattatggtgctagattttacttttacaccagtaaaacaactgtagcgtcacttatcaacacacttaacgatctaaatgaaactcttgttacaatgccacttggctatgtaacacatggcttaaatttggaagaagctgctcggtatatgagatctctcaaagtgccagctacagtttctgtttcttcacctgatgctgttacagcgtataatggttatcttacttcttcttctaaaacacctgaagaacattttattgaaaccatctcacttgctggttcctataaagattggtcctattctggacaatctacacaactaggtatagaatttcttaagagaggtgataaaagtgtatattacactagtaatcctaccacattccacctagatggtgaagttatcacctttgacaatcttaagacacttctttctttgagagaagtgaggactattaaggtgtttacaacagtagacaacattaacctccacacgcaagttgtggacatgtcaatgacatatggacaacagtttggtccaacttatttggatggagctgatgttactaaaataaaacctcataattcacatgaaggtaaaacattttatgttttacctaatgatgacactctacgtgttgaggcttttgagtactaccacacaactgatcctagttttctgggtaggtacatgtcagcattaaatcacactaaaaagtggaaatacccacaagttaatggtttaacttctattaaatgggcagataacaactgttatcttgccactgcattgttaacactccaacaaatagagttgaagtttaatccacctgctctacaagatgcttattacagagcaagggctggtgaagctgctaacttttgtgcacttatcttagcctactgtaataagacagtaggtgagttaggtgatgttagagaaacaatgagttacttgtttcaacatgccaatttagattcttgcaaaagagtcttgaacgtggtgtgtaaaacttgtggacaacagcagacaacccttaagggtgtagaagctgttatgtacatgggcacactttcttatgaacaatttaagaaaggtgttcagataccttgtacgtgtggtaaacaagctacaaaatatctagtacaacaggagtcaccttttgttatgatgtcagcaccacctgctcagtatgaacttaagcatggtacatttacttgtgctagtgagtacactggtaattaccagtgtggtcactataaacatataacttctaaagaaactttgtattgcatagacggtgctttacttacaaagtcctcagaatacaaaggtcctattacggatgttttctacaaagaaaacagttacacaacaaccataaaaccagttacttataaattggatggtgttgtttgtacagaaattgaccctaagttggacaattattataagaaagacaattcttatttcacagagcaaccaattgatcttgtaccaaaccaaccatatccaaacgcaagcttcgataattttaagtttgtatgtgataatatcaaatttgctgatgatttaaaccagttaactggttataagaaacctgcttcaagagagcttaaagttacatttttccctgacttaaatggtgatgtggtggctattgattataaacactacacaccctcttttaagaaaggagctaaattgttacataaacctattgtttggcatgttaacaatgcaactaataaagccacgtataaaccaaatacctggtgtatacgttgtctttggagcacaaaaccagttgaaacatcaaattcgtttgatgtactgaagtcagaggacgcgcagggaatggataatcttgcctgcgaagatctaaaaccagtctctgaagaagtagtggaaaatcctaccatacagaaagacgttcttgagtgtaatgtgaaaactaccgaagttgtaggagacattatacttaaaccagcaaataatagtttaaaaattacagaagaggttggccacacagatctaatggctgcttatgtagacaattctagtcttactattaagaaacctaatgaattatctagagtattaggtttgaaaacccttgctactcatggtttagctgctgttaatagtgtcccttgggatactatagctaattatgctaagccttttcttaacaaagttgttagtacaactactaacatagttacacggtgtttaaaccgtgtttgtactaattatatgccttatttctttactttattgctacaattgtgtacttttactagaagtacaaattctagaattaaagcatctatgccgactactatagcaaagaatactgttaagagtgtcggtaaattttgtctagaggcttcatttaattatttgaagtcacctaatttttctaaactgataaatattataatttggtttttactattaagtgtttgcctaggttctttaatctactcaaccgctgctttaggtgttttaatgtctaatttaggcatgccttcttactgtactggttacagagaaggctatttgaactctactaatgtcactattgcaacctactgtactggttctataccttgtagtgtttgtcttagtggtttagattctttagacacctatccttctttagaaactatacaaattaccatttcatcttttaaatgggatttaactgcttttggcttagttgcagagtggtttttggcatatattcttttcactaggtttttctatgtacttggattggctgcaatcatgcaattgtttttcagctattttgcagtacattttattagtaattcttggcttatgtggttaataattaatcttgtacaaatggccccgatttcagctatggttagaatgtacatcttctttgcatcattttattatgtatggaaaagttatgtgcatgttgtagacggttgtaattcatcaacttgtatgatgtgttacaaacgtaatagagcaacaagagtcgaatgtacaactattgttaatggtgttagaaggtccttttatgtctatgctaatggaggtaaaggcttttgcaaactacacaattggaattgtgttaattgtgatacattctgtgctggtagtacatttattagtgatgaagttgcgagagacttgtcactacagtttaaaagaccaataaatcctactgaccagtcttcttacatcgttgatagtgttacagtgaagaatggttccatccatctttactttgataaagctggtcaaaagacttatgaaagacattctctctctcattttgttaacttagacaacctgagagctaataacactaaaggttcattgcctattaatgttatagtttttgatggtaaatcaaaatgtgaagaatcatctgcaaaatcagcgtctgtttactacagtcagcttatgtgtcaacctatactgttactagatcaggcattagtgtctgatgttggtgatagtgcggaagttgcagttaaaatgtttgatgcttacgttaatacgttttcatcaacttttaacgtaccaatggaaaaactcaaaacactagttgcaactgcagaagctgaacttgcaaagaatgtgtccttagacaatgtcttatctacttttatttcagcagctcggcaagggtttgttgattcagatgtagaaactaaagatgttgttgaatgtcttaaattgtcacatcaatctgacatagaagttactggcgatagttgtaataactatatgctcacctataacaaagttgaaaacatgacaccccgtgaccttggtgcttgtattgactgtagtgcgcgtcatattaatgcgcaggtagcaaaaagtcacaacattgctttgatatggaacgttaaagatttcatgtcattgtctgaacaactacgaaaacaaatacgtagtgctgctaaaaagaataacttaccttttaagttgacatgtgcaactactagacaagttgttaatgttgtaacaacaaagatagcacttaagggtggtaaaattgttaataattggttgaagcagttaattaaagttacacttgtgttcctttttgttgctgctattttctatttaataacacctgttcatgtcatgtctaaacatactgacttttcaagtgaaatcataggatacaaggctattgatggtggtgtcactcgtgacatagcatctacagatacttgttttgctaacaaacatgctgattttgacacatggtttagccagcgtggtggtagttatactaatgacaaagcttgcccattgattgctgcagtcataacaagagaagtgggttttgtcgtgcctggtttgcctggcacgatattacgcacaactaatggtgactttttgcatttcttacctagagtttttagtgcagttggtaacatctgttacacaccatcaaaacttatagagtacactgactttgcaacatcagcttgtgttttggctgctgaatgtacaatttttaaagatgcttctggtaagccagtaccatattgttatgataccaatgtactagaaggttctgttgcttatgaaagtttacgccctgacacacgttatgtgctcatggatggctctattattcaatttcctaacacctaccttgaaggttctgttagagtggtaacaacttttgattctgagtactgtaggcacggcacttgtgaaagatcagaagctggtgtttgtgtatctactagtggtagatgggtacttaacaatgattattacagatctttaccaggagttttctgtggtgtagatgctgtaaatttacttactaatatgtttacaccactaattcaacctattggtgctttggacatatcagcatctatagtagctggtggtattgtagctatcgtagtaacatgccttgcctactattttatgaggtttagaagagcttttggtgaatacagtcatgtagttgcctttaatactttactattccttatgtcattcactgtactctgtttaacaccagtttactcattcttacctggtgtttattctgttatttacttgtacttgacattttatcttactaatgatgtttcttttttagcacatattcagtggatggttatgttcacacctttagtacctttctggataacaattgcttatatcatttgtatttccacaaagcatttctattggttctttagtaattacctaaagagacgtgtagtctttaatggtgtttcctttagtacttttgaagaagctgcgctgtgcacctttttgttaaataaagaaatgtatctaaagttgcgtagtgatgtgctattacctcttacgcaatataatagatacttagctctttataataagtacaagtattttagtggagcaatggatacaactagctacagagaagctgcttgttgtcatctcgcaaaggctctcaatgacttcagtaactcaggttctgatgttctttaccaaccaccacaaacctctatcacctcagctgttttgcagagtggttttagaaaaatggcattcccatctggtaaagttgagggttgtatggtacaagtaacttgtggtacaactacacttaacggtctttggcttgatgacgtagtttactgtccaagacatgtgatctgcacctctgaagacatgcttaaccctaattatgaagatttactcattcgtaagtctaatcataatttcttggtacaggctggtaatgttcaactcagggttattggacattctatgcaaaattgtgtacttaagcttaaggttgatacagccaatcctaagacacctaagtataagtttgttcgcattcaaccaggacagactttttcagtgttagcttgttacaatggttcaccatctggtgtttaccaatgtgctatgaggcccaatttcactattaagggttcattccttaatggttcatgtggtagtgttggttttaacatagattatgactgtgtctctttttgttacatgcaccatatggaattaccaactggagttcatgctggcacagacttagaaggtaacttttatggaccttttgttgacaggcaaacagcacaagcagctggtacggacacaactattacagttaatgttttagcttggttgtacgctgctgttataaatggagacaggtggtttctcaatcgatttaccacaactcttaatgactttaaccttgtggctatgaagtacaattatgaacctctaacacaagaccatgttgacatactaggacctctttctgctcaaactggaattgccgttttagatatgtgtgcttcattaaaagaattactgcaaaatggtatgaatggacgtaccatattgggtagtgctttattagaagatgaatttacaccttttgatgttgttagacaatgctcaggtgttactttccaaagtgcagtgaaaagaacaatcaagggtacacaccactggttgttactcacaattttgacttcacttttagttttagtccagagtactcaatggtctttgttcttttttttgtatgaaaatgcctttttaccttttgctatgggtattattgctatgtctgcttttgcaatgatgtttgtcaaacataagcatgcatttctctgtttgtttttgttaccttctcttgccactgtagcttattttaatatggtctatatgcctgctagttgggtgatgcgtattatgacatggttggatatggttgatactagtttgtctggttttaagctaaaagactgtgttatgtatgcatcagctgtagtgttactaatccttatgacagcaagaactgtgtatgatgatggtgctaggagagtgtggacacttatgaatgtcttgacactcgtttataaagtttattatggtaatgctttagatcaagccatttccatgtgggctcttataatctctgttacttctaactactcaggtgtagttacaactgtcatgtttttggccagaggtattgtttttatgtgtgttgagtattgccctattttcttcataactggtaatacacttcagtgtataatgctagtttattgtttcttaggctatttttgtacttgttactttggcctcttttgtttactcaaccgctactttagactgactcttggtgtttatgattacttagtttctacacaggagtttagatatatgaattcacagggactactcccacccaagaatagcatagatgccttcaaactcaacattaaattgttgggtgttggtggcaaaccttgtatcaaagtagccactgtacagtctaaaatgtcagatgtaaagtgcacatcagtagtcttactctcagttttgcaacaactcagagtagaatcatcatctaaattgtgggctcaatgtgtccagttacacaatgacattctcttagctaaagatactactgaagcctttgaaaaaatggtttcactactttctgttttgctttccatgcagggtgctgtagacataaacaagctttgtgaagaaatgctggacaacagggcaaccttacaagctatagcctcagagtttagttcccttccatcatatgcagcttttgctactgctcaagaagcttatgagcaggctgttgctaatggtgattctgaagttgttcttaaaaagttgaagaagtctttgaatgtggctaaatctgaatttgaccgtgatgcagccatgcaacgtaagttggaaaagatggctgatcaagctatgacccaaatgtataaacaggctagatctgaggacaagagggcaaaagttactagtgctatgcagacaatgcttttcactatgcttagaaagttggataatgatgcactcaacaacattatcaacaatgcaagagatggttgtgttcccttgaacataatacctcttacaacagcagccaaactaatggttgtcataccagactataacacatataaaaatacgtgtgatggtacaacatttacttatgcatcagcattgtgggaaatccaacaggttgtagatgcagatagtaaaattgttcaacttagtgaaattagtatggacaattcacctaatttagcatggcctcttattgtaacagctttaagggccaattctgctgtcaaattacagaataatgagcttagtcctgttgcactacgacagatgtcttgtgctgccggtactacacaaactgcttgcactgatgacaatgcgttagcttactacaacacaacaaagggaggtaggtttgtacttgcactgttatccgatttacaggatttgaaatgggctagattccctaagagtgatggaactggtactatctatacagaactggaaccaccttgtaggtttgttacagacacacctaaaggtcctaaagtgaagtatttatactttattaaaggattaaacaacctaaatagaggtatggtacttggtagtttagctgccacagtacgtctacaagctggtaatgcaacagaagtgcctgccaattcaactgtattatctttctgtgcttttgctgtagatgctgctaaagcttacaaagattatctagctagtgggggacaaccaatcactaattgtgttaagatgttgtgtacacacactggtactggtcaggcaataacagttacaccggaagccaatatggatcaagaatcctttggtggtgcatcgtgttgtctgtactgccgttgccacatagatcatccaaatcctaaaggattttgtgacttaaaaggtaagtatgtacaaatacctacaacttgtgctaatgaccctgtgggttttacacttaaaaacacagtctgtaccgtctgcggtatgtggaaaggttatggctgtagttgtgatcaactccgcgaacccatgcttcagtcagctgatgcacaatcgtttttaaacgggtttgcggtgtaagtgcagcccgtcttacaccgtgcggcacaggcactagtactgatgtcgtatacagggcttttgacatctacaatgataaagtagctggttttgctaaattcctaaaaactaattgttgtcgcttccaagaaaaggacgaagatgacaatttaattgattcttactttgtagttaagagacacactttctctaactaccaacatgaagaaacaatttataatttacttaaggattgtccagctgttgctaaacatgacttctttaagtttagaatagacggtgacatggtaccacatatatcacgtcaacgtcttactaaatacacaatggcagacctcgtctatgctttaaggcattttgatgaaggtaattgtgacacattaaaagaaatacttgtcacatacaattgttgtgatgatgattatttcaataaaaaggactggtatgattttgtagaaaacccagatatattacgcgtatacgccaacttaggtgaacgtgtacgccaagctttgttaaaaacagtacaattctgtgatgccatgcgaaatgctggtattgttggtgtactgacattagataatcaagatctcaatggtaactggtatgatttcggtgatttcatacaaaccacgccaggtagtggagttcctgttgtagattcttattattcattgttaatgcctatattaaccttgaccagggctttaactgcagagtcacatgttgacactgacttaacaaagccttacattaagtgggatttgttaaaatatgacttcacggaagagaggttaaaactctttgaccgttattttaaatattgggatcagacataccacccaaattgtgttaactgtttggatgacagatgcattctgcattgtgcaaactttaatgttttattctctacagtgttcccacttacaagttttggaccactagtgagaaaaatatttgttgatggtgttccatttgtagtttcaactggataccacttcagagagctaggtgttgtacataatcaggatgtaaatttacatagctctagacttagttttaaggaattacttgtgtatgctgctgaccctgctatgcacgctgcttctggtaatctattactagataaacgcactacgtgcttttcagtagctgcacttactaacaatgttgcttttcaaactgtcaaacccggtaattttaacaaagacttctatgactttgctgtgtctaagggtttctttaaggaaggaagttctgttgaattaaaacacttcttctttgctcaggatggtaatgctgctatcagcgattatgactactatcgttataatctaccaacaatgtgtgatatcagacaactactatttgtagttgaagttgttgataagtactttgattgttacgatggtggctgtattaatgctaaccaagtcatcgtcaacaacctagacaaatcagctggttttccatttaataaatggggtaaggctagactttattatgattcaatgagttatgaggatcaagatgcacttttcgcatatacaaaacgtaatgtcatccctactataactcaaatgaatcttaagtatgccattagtgcaaagaatagagctcgcaccgtagctggtgtctctatctgtagtactatgaccaatagacagtttcatcaaaaattattgaaatcaatagccgccactagaggagctactgtagtaattggaacaagcaaattctatggtggttggcacaacatgttaaaaactgtttatagtgatgtagaaaaccctcaccttatgggttgggattatcctaaatgtgatagagccatgcctaatatgcttagaattatggcctcacttgttcttgctcgcaaacatacaacgtgttgtagcttgtcacaccgtttctatagattagctaatgagtgtgctcaagtattgagtgaaatggtcatgtgtggcggttcactatatgttaaaccaggtggaacctcatcaggagatgccacaactgcttatgctaatagtgtttttaacatttgtcaagctgtcacggccaatgttaatgcacttttatctactgatggtaacaaaattgccgataagtatgtccgcaatttacaacacagactttatgagtgtctctatagaaatagagatgttgacacagactttgtgaatgagttttacgcatatttgcgtaaacatttctcaatgatgatactctctgacgatgctgttgtgtgtttcaatagcacttatgcatctcaaggtctagtggctagcataaagaactttaagtcagttctttattatcaaaacaatgtttttatgtctgaagcaaaatgttggactgagactgaccttactaaaggacctcatgaattttgctctcaacatacaatgctagttaaacagggtgatgattatgtgtaccttccttacccagatccatcaagaatcctaggggccggctgttttgtagatgatatcgtaaaaacagatggtacacttatgattgaacggttcgtgtctttagctatagatgcttacccacttactaaacatcctaatcaggagtatgctgatgtctttcatttgtacttacaatacataagaaagctacatgatgagttaacaggacacatgttagacatgtattctgttatgcttactaatgataacacttcaaggtattgggaacctgagttttatgaggctatgtacacaccgcatacagtcttacaggctgttggggcttgtgttctttgcaattcacagacttcattaagatgtggtgcttgcatacgtagaccattcttatgttgtaaatgctgttacgaccatgtcatatcaacatcacataaattagtcttgtctgttaatccgtatgtttgcaatgctccaggttgtgatgtcacagatgtgactcaactttacttaggaggtatgagctattattgtaaatcacataaaccacccattagttttccattgtgtgctaatggacaagtttttggtttatataaaaatacatgtgttggtagcgataatgttactgactttaatgcaattgcaacatgtgactggacaaatgctggtgattacattttagctaacacctgtactgaaagactcaagctttttgcagcagaaacgctcaaagctactgaggagacatttaaactgtcttatggtattgctactgtacgtgaagtgctgtctgacagagaattacatctttcatgggaagttggtaaacctagaccaccacttaaccgaaattatgtctttactggttatcgtgtaactaaaaacagtaaagtacaaataggagagtacacctttgaaaaaggtgactatggtgatgctgttgtttaccgaggtacaacaacttacaaattaaatgttggtgattattttgtgctgacatcacatacagtaatgccattaagtgcacctacactagtgccacaagagcactatgttagaattactggcttatacccaacactcaatatctcagatgagttttctagcaatgttgcaaattatcaaaaggttggtatgcaaaagtattctacactccagggaccacctggtactggtaagagtcattttgctattggcctagctctctactacccttctgctcgcatagtgtatacagcttgctctcatgccgctgttgatgcactatgtgagaaggcattaaaatatttgcctatagataaatgtagtagaattatacctgcacgtgctcgtgtagagtgttttgataaattcaaagtgaattcaacattagaacagtatgtcttttgtactgtaaatgcattgcctgagacgacagcagatatagttgtctttgatgaaatttcaatggccacaaattatgatttgagtgttgtcaatgccagattacgtgctaagcactatgtgtacattggcgaccctgctcaattacctgcaccacgcacattgctaactaagggcacactagaaccagaatatttcaattcagtgtgtagacttatgaaaactataggtccagacatgttcctcggaacttgtcggcgttgtcctgctgaaattgttgacactgtgagtgctttggtttatgataataagcttaaagcacataaagacaaatcagctcaatgctttaaaatgttttataagggtgttatcacgcatgatgtttcatctgcaattaacaggccacaaataggcgtggtaagagaattccttacacgtaaccctgcttggagaaaagctgtctttatttcaccttataattcacagaatgctgtagcctcaaagattttgggactaccaactcaaactgttgattcatcacagggctcagaatatgactatgtcatattcactcaaaccactgaaacagctcactcttgtaatgtaaacagatttaatgttgctattaccagagcaaaagtaggcatactttgcataatgtctgatagagacctttatgacaagttgcaatttacaagtcttgaaattccacgtaggaatgtggcaactttacaagctgaaaatgtaacaggactctttaaagattgtagtaaggtaatcactgggttacatcctacacaggcacctacacacctcagtgttgacactaaattcaaaactgaaggtttatgtgttgacatacctggcatacctaaggacatgacctatagaagactcatctctatgatgggttttaaaatgaattatcaagttaatggttaccctaacatgtttatcacccgcgaagaagctataagacatgtacgtgcatggattggcttcgatgtcgaggggtgtcatgctactagagaagctgttggtaccaatttacctttacagctaggtttttctacaggtgttaacctagttgctgtacctacaggttatgttgatacacctaataatacagatttttccagagttagtgctaaaccaccgcctggagatcaatttaaacacctcataccacttatgtacaaaggacttccttggaatgtagtgcgtataaagattgtacaaatgttaagtgacacacttaaaaatctctctgacagagtcgtatttgtcttatgggcacatggctttgagttgacatctatgaagtattttgtgaaaataggacctgagcgcacctgttgtctatgtgatagacgtgccacatgcttttccactgcttcagacacttatgcctgttggcatcattctattggatttgattacgtctataatccgtttatgattgatgttcaacaatggggttttacaggtaacctacaaagcaaccatgatctgtattgtcaagtccatggtaatgcacatgtagctagttgtgatgcaatcatgactaggtgtctagctgtccacgagtgctttgttaagcgtgttgactggactattgaatatcctataattggtgatgaactgaagattaatgcggcttgtagaaaggttcaacacatggttgttaaagctgcattattagcagacaaattcccagttcttcacgacattggtaaccctaaagctattaagtgtgtacctcaagctgatgtagaatggaagttctatgatgcacagccttgtagtgacaaagcttataaaatagaagaattattctattcttatgccacacattctgacaaattcacagatggtgtatgcctattttggaattgcaatgtcgatagatatcctgctaattccattgtttgtagatttgacactagagtgctatctaaccttaacttgcctggttgtgatggtggcagtttgtatgtaaataaacatgcattccacacaccagcttttgataaaagtgcttttgttaatttaaaacaattaccatttttctattactctgacagtccatgtgagtctcatggaaaacaagtagtgtcagatatagattatgtaccactaaagtctgctacgtgtataacacgttgcaatttaggtggtgctgtctgtagacatcatgctaatgagtacagattgtatctcgatgcttataacatgatgatctcagctggctttagcttgtgggtttacaaacaatttgatacttataacctctggaacacttttacaagacttcagagtttagaaaatgtggcttttaatgttgtaaataagggacactttgatggacaacagggtgaagtaccagtttctatcattaataacactgtttacacaaaagttgatggtgttgatgtagaattgtttgaaaataaaacaacattacctgttaatgtagcatttgagctttgggctaagcgcaacattaaaccagtaccagaggtgaaaatactcaataatttgggtgtggacattgctgctaatactgtgatctgggactacaaaagagatgctccagcacatatatctactattggtgtttgttctatgactgacatagccaagaaaccaactgaaacgatttgtgcaccactcactgtcttttttgatggtagagttgatggtcaagtagacttatttagaaatgcccgtaatggtgttcttattacagaaggtagtgttaaaggtttacaaccatctgtaggtcccaaacaagctagtcttaatggagtcacattaattggagaagccgtaaaaacacagttcaattattataagaaagttgatggtgttgtccaacaattacctgaaacttactttactcagagtagaaatttacaagaatttaaacccaggagtcaaatggaaattgatttcttagaattagctatggatgaattcattgaacggtataaattagaaggctatgccttcgaacatatcgtttatggagattttagtcatagtcagttaggtggtttacatctactgattggactagctaaacgttttaaggaatcaccttttgaattagaagattttattcctatggacagtacagttaaaaactatttcataacagatgcgcaaacaggttcatctaagtgtgtgtgttctgttattgatttattacttgatgattttgttgaaataataaaatcccaagatttatctgtagtttctaaggttgtcaaagtgactattgactatacagaaatttcatttatgctttggtgtaaagatggccatgtagaaacattttacccaaaattacaatctagtcaagcgtggcaaccgggtgttgctatgcctaatctttacaaaatgcaaagaatgctattagaaaagtgtgaccttcaaaattatggtgatagtgcaacattacctaaaggcataatgatgaatgtcgcaaaatatactcaactgtgtcaatatttaaacacattaacattagctgtaccctataatatgagagttatacattttggtgctggttctgataaaggagttgcaccaggtacagctgttttaagacagtggttgcctacgggtacgctgcttgtcgactcagatcttaatgactttgtctctgatgcagattcaactttgattggtgattgtgcaactgtacatacagctaataaatgggatctcattattagtgatatgtacgaccctaagactaaaaatgttacaaaagaaaatgactctaaagagggttttttcacttacatttgtgggtttatacaacaaaagctagctcttggaggttccgtggctataaagataacagaacattcttggaatgctgatctttataagctcatgggacacttcgcatggtggacagcctttgttactaatgtgaatgcgtcatcatctgaagcatttttaattggatgtaattatcttggcaaaccacgcgaacaaatagatggttatgtcatgcatgcaaattacatattttggaggaatacaaatccaattcagttgtcttcctattctttatttgacatgagtaaatttccccttaaattaaggggtactgctgttatgtctttaaaagaaggtcaaatcaatgatatgattttatctcttcttagtaaaggtagacttataattagagaaaacaacagagttgttatttctagtgatgttcttgttaacaactaaacgaacaatgtttgtttttcttgttttattgccactagtctctagtcagtgtgttaatcttacaaccagaactcaattaccccctgcatacactaattctttcacacgtggtgtttattaccctgacaaagttttcagatcctcagttttacattcaactcaggacttgttcttacctttcttttccaatgttacttggttccatgctatacatgtctctgggaccaatggtactaagaggtttgataaccctgtcctaccatttaatgatggtgtttattttgcttccactgagaagtctaacataataagaggctggatttttggtactactttagattcgaagacccagtccctacttattgttaataacgctactaatgttgttattaaagtctgtgaatttcaattttgtaatgatccatttttgggtgtttattaccacaaaaacaacaaaagttggatggaaagtgagttcagagtttattctagtgcgaataattgcacttttgaatatgtctctcagccttttcttatggaccttgaaggaaaacagggtaatttcaaaaatcttagggaatttgtgtttaagaatattgatggttattttaaaatatattctaagcacacgcctattaatttagtgcgtgatctccctcagggtttttcggctttagaaccattggtagatttgccaataggtattaacatcactaggtttcaaactttacttgctttacatagaagttatttgactcctggtgattcttcttcaggttggacagctggtgctgcagcttattatgtgggttatcttcaacctaggacttttctattaaaatataatgaaaatggaaccattacagatgctgtagactgtgcacttgaccctctctcagaaacaaagtgtacgttgaaatccttcactgtagaaaaaggaatctatcaaacttctaactttagagtccaaccaacagaatctattgttagatttcctaatattacaaacttgtgcccttttggtgaagtttttaacgccaccagatttgcatctgtttatgcttggaacaggaagagaatcagcaactgtgttgctgattattctgtcctatataattccgcatcattttccacttttaagtgttatggagtgtctcctactaaattaaatgatctctgctttactaatgtctatgcagattcatttgtaattagaggtgatgaagtcagacaaatcgctccagggcaaactggaaagattgctgattataattataaattaccagatgattttacaggctgcgttatagcttggaattctaacaatcttgattctaaggttggtggtaattataattacctgtatagattgtttaggaagtctaatctcaaaccttttgagagagatatttcaactgaaatctatcaggccggtagcacaccttgtaatggtgttgaaggttttaattgttactttcctttacaatcatatggtttccaacccactaatggtgttggttaccaaccatacagagtagtagtactttcttttgaacttctacatgcaccagcaactgtttgtggacctaaaaagtctactaatttggttaaaaacaaatgtgtcaatttcaacttcaatggtttaacaggcacaggtgttcttactgagtctaacaaaaagtttctgcctttccaacaatttggcagagacattgctgacactactgatgctgtccgtgatccacagacacttgagattcttgacattacaccatgttcttttggtggtgtcagtgttataacaccaggaacaaatacttctaaccaggttgctgttctttatcagggtgttaactgcacagaagtccctgttgctattcatgcagatcaacttactcctacttggcgtgtttattctacaggttctaatgtttttcaaacacgtgcaggctgtttaataggggctgaacatgtcaacaactcatatgagtgtgacatacccattggtgcaggtatatgcgctagttatcagactcagactaattctcctcggcgggcacgtagtgtagctagtcaatccatcattgcctacactatgtcacttggtgcagaaaattcagttgcttactctaataactctattgccatacccacaaattttactattagtgttaccacagaaattctaccagtgtctatgaccaagacatcagtagattgtacaatgtacatttgtggtgattcaactgaatgcagcaatcttttgttgcaatatggcagtttttgtacacaattaaaccgtgctttaactggaatagctgttgaacaagacaaaaacacccaagaagtttttgcacaagtcaaacaaatttacaaaacaccaccaattaaagattttggtggttttaatttttcacaaatattaccagatccatcaaaaccaagcaagaggtcatttattgaagatctacttttcaacaaagtgacacttgcagatgctggcttcatcaaacaatatggtgattgccttggtgatattgctgctagagacctcatttgtgcacaaaagtttaacggccttactgttttgccacctttgctcacagatgaaatgattgctcaatacacttctgcactgttagcgggtacaatcacttctggttggacctttggtgcaggtgctgcattacaaataccatttgctatgcaaatggcttataggtttaatggtattggagttacacagaatgttctctatgagaaccaaaaattgattgccaaccaatttaatagtgctattggcaaaattcaagactcactttcttccacagcaagtgcacttggaaaacttcaagatgtggtcaaccaaaatgcacaagctttaaacacgcttgttaaacaacttagctccaattttggtgcaatttcaagtgttttaaatgatatcctttcacgtcttgacaaagttgaggctgaagtgcaaattgataggttgatcacaggcagacttcaaagtttgcagacatatgtgactcaacaattaattagagctgcagaaatcagagcttctgctaatcttgctgctactaaaatgtcagagtgtgtacttggacaatcaaaaagagttgatttttgtggaaagggctatcatcttatgtccttccctcagtcagcacctcatggtgtagtcttcttgcatgtgacttatgtccctgcacaagaaaagaacttcacaactgctcctgccatttgtcatgatggaaaagcacactttcctcgtgaaggtgtctttgtttcaaatggcacacactggtttgtaacacaaaggaatttttatgaaccacaaatcattactacagacaacacatttgtgtctggtaactgtgatgttgtaataggaattgtcaacaacacagtttatgatcctttgcaacctgaattagactcattcaaggaggagttagataaatattttaagaatcatacatcaccagatgttgatttaggtgacatctctggcattaatgcttcagttgtaaacattcaaaaagaaattgaccgcctcaatgaggttgccaagaatttaaatgaatctctcatcgatctccaagaacttggaaagtatgagcagtatataaaatggccatggtacatttggctaggttttatagctggcttgattgccatagtaatggtgacaattatgctttgctgtatgaccagttgctgtagttgtctcaagggctgttgttcttgtggatcctgctgcaaatttgatgaannngactctgagccagtgctcaaaggagtcaaattacattacacataaacgaacttatggatttgtttatgagaatcttcacaattggaactgtaactttgaagcaaggtgaaatcaaggatgctactccttcagattttgttcgcgctactgcaacgataccgatacaagcctcactccctttcggatggcttattgttggcgttgcacttcttgctgtttttcagagcgcttccaaaatcataaccctcaaaaagagatggcaactagcactctccaagggtgttcactttgtttgcaacttgctgttgttgtttgtaacagtttactcacaccttttgctcgttgctgctggccttgaagccccttttctctatctttatgctttagtctacttcttgcagagtataaactttgtaagaataataatgaggctttggctttgctggaaatgccgttccaaaaacccattactttatgatgccaactattttctttgctggcatactaattgttacgactattgtataccttacaatagtgtaacttcttcaattgtcattacttcaggtgatggcacaacaagtcctatttctgaacatgactaccagattggtggttatactgaaaaatgggaatctggagtaaaagactgtgttgtattacacagttacttcacttcagactattaccagctgtactcaactcaattgagtacagacactggtgttgaacatgttaccttcttcatctacaataaaattgttgatgagcctgaagaacatgtccaaattcacacaatcgacggttcatccggagttgttaatccagtaatggaaccaatttatgatgaaccgacgacgactactagcgtgcctttgtaagcacaagctgatgagtacgaacttatgtactcattcgtttcggaagagacaggtacgttaatagttaatagcgtacttctttttcttgctttcgtggtattcttgctagttacactagccatccttactgcgcttcgattgtgtgcgtactgctgcaatattgttaacgtgagtcttgtaaaaccttctttttacgtttactctcgtgttaaaaatctgaattcttctagagttcctgatcttccggtctaaacgaactaaatattatattagtttttctgtttggaactttaattttagccatggcagattccaacggtactattaccgttgaagagcttaaaaagctccttgaacaatggaacctagtaataggtttcctattccttacatggatttgtcttctacaatttgcctatgccaacaggaataggtttttgtatataattaagttaattttcctctggctgttatggccagtaactttagcttgttttgtgcttgctgctgtttacagaataaattggatcaccggtggaattgctatcgcaatggcttgtcttgtaggcttgatgtggctcagctacttcattgcttctttcagactgtttgcgcgtacgcgttccatgtggtcattcaatccagaaactaacattcttctcaacgtgccactccatggcactattctgaccagaccgcttctagaaagtgaactcgtaatcggagctgtgatccttcgtggacatcttcgtattgctggacaccatctaggacgctgtgacatcaaggacctgcctaaagaaatcactgttgctacatcacgaacgctttcttattacaaattgggagcttcgcagcgtgtagcaggtgactcaggttttgctgcatacagtcgctacaggattggcaactataaattaaacacagaccattccagtagcagtgacaatattgctttgcttgtacagtaagtgacaacagatgtttcatctcgttgactttcaggttactatagcagagatattactaattattatgaggacttttaaagtttccatttggaatcttgattacatcataaacctcataattaaaaatttatctaagtcactaactgagaataaatattctcaattagatgaagagcaaccaatggagattgattaaacgaacatgaaaattattcttttcttggcactgataacactcgctacttgtgagctttatcactaccaagagtgtgttagaggtacaacagtacttttaaaagaaccttgctcttctggaacatacgagggcaattcaccatttcatcctctagctgataacaaatttgcactgacttgctttagcactcaatttgcttttgcttgtcctgacggcgtaaaacacgtctatcagttacgtgccagatcagtttcacctaaactgttcatcagacaagaggaagttcaagaactttactctccaatttttcttattgttgcggcaatagtgtttataacactttgcttcacactcaaaagaaagacagaatgattgaactttcattaattgacttctatttgtgctttttagcctttctgctattccttgttttaattatgcttattatcttttggttctcacttgaactgcaagatcataatgaaacttgtcacgcctaaacgaacatgaaatttcttgttttcttaggaatcatcacaactgtagctgcatttcaccaagaatgtagtttacagtcatgtactcaacatcaaccatatgtagttgatgacccgtgtcctattcacttctattctaaatggtatattagagtaggagctagaaaatcagcacctttaattgaattgtgcgtggatgaggctggttctaaatcacccattcagtacatcgatatcggtaattatacagtttcctgtttaccttttacaattaattgccaggaacctaaattgggtagtcttgtagtgcgttgttcgttctatgaagactttttagagtatcatgacgttcgtgttgttttagatttcatctaaacgaacaaactaaaatgtctgataatggaccccaaaatcagcgaaatgcaccccgcattacgtttggtggaccctcagattcaactggcagtaaccagaatggagaacgcagtggggcgcgatcaaaacaacgtcggccccaaggtttacccaataatactgcgtcttggttcaccgctctcactcaacatggcaaggaagaccttaaattccctcgaggacaaggcgttccaattaacaccaatagcagtccagatgaccaaattggctactaccgaagagctaccagacgaattcgtggtggtgacggtaaaatgaaagatctcagtccaagatggtatttctactacctaggaactgggccagaagctggacttccctatggtgctaacaaagacggcatcatatgggttgcaactgagggagccttgaatacaccaaaagatcacattggcacccgcaatcctgctaacaatgctgcaatcgtgctacaacttcctcaaggaacaacattgccaaaaggcttctacgcagaagggagcagaggcggcagtcaagcctcttctcgttcctcatcacgtagtcgcaacagttcaagaaattcaactccaggcagcagtaggggaacttctcctgctagaatggctggcaatggcggtgatgctgctcttgctttgctgctgcttgacagattgaaccagcttgagagcaaaatgtctggtaaaggccaacaacaacaaggccaaactgtcactaagaaatctgctgctgaggcttctaagaagcctcggcaaaaacgtactgccactaaagcatacaatgtaacacaagctttcggcagacgtggtccagaacaaacccaaggaaattttggggaccaggaactaatcagacaaggaactgattacaaacattggccgcaaattgcacaatttgcccccagcgcttcagcgttcttcggaatgtcgcgcattggcatggaagtcacaccttcgggaacgtggttgacctacacaggtgccatcaaattggatgacaaagatccaaatttcaaagatcaagtcattttgctgaataagcatattgacgcatacaaaacattcccaccaacagagcctaaaaaggacaaaaagaagaaggctgatgaaactcaagccttaccgcagagacagaagaaacagcaaactgtgactcttcttcctgctgcagatttggatgatttctccaaacaattgcaacaatccatgagcagtgctgactcaactcaggcctaaactcatgcagaccacacaaggcagatgggctatataaacgttttcgcttttccgtttacgatatatagtctactcttgtgcagaatgaattctcgtaactacatagcacaagtagatgtagttaactttaatctcacatagcaatctttaatcagtgtgtaacattagggaggacttgaaagagccaccacattttcaccgaggccacgcggagtacgatcgagtgtacagtgaacaatgctagggagagctgcctatatggaagagccctaatgtgtaaaattaattttagtagtgctatccccatgtg

SEQ ID NO: 60 - DNA, 29805 bp, synthetic construct
  misc_feature 1..29805: note = Reconstituted virus 23
  source 1..29805: mol_type = other DNA
actttcgatctcttgtagatctgttctctaaacgaactttaaaatctgtgtggctgtcactcggctgcatgcttagtgcactcacgcagtataattaataactaattactgtcgttgacaggacacgagtaactcgtctatcttctgcaggctgcttacggtttcgtccgtgttgcagccgatcatcagcacatctaggttttgtccgggtgtgaccgaaaggtaagatggagagccttgtccctggtttcaacgagaaaacacacgtccaactcagtttgcctgttttacaggttcgcgacgtgctcgtacgtggctttggagactccgtggaggaggtcttatcagaggcacgtcaacatcttaaagatggcacttgtggcttagtagaagttgaaaaaggcgttttgcctcaacttgaacagccctatgtgttcatcaaacgttcggatgctcgaactgcacctcatggtcatgttatggttgagctggtagcagaactcgaaggcattcagtacggtcgtagtggtgagacacttggtgtccttgtccctcatgtgggcgaaataccagtggcttaccgcaaggttcttcttcgtaagaacggtaataaaggagctggtggccatagttacggcgccgatctaaagtcatttgacttaggcgacgagcttggcactgatccttatgaagattttcaagaaaactggaacactaaacatagcagtggtgttacccgtgaactcatgcgtgagcttaacggaggggcatacactcgctatgtcgataacaacttctgtggccctgatggctaccctcttgagtgcattaaagaccttctagcacgtgctggtaaagcttcatgcactttgtccgaacaactggactttattgacactaagaggggtgtatactgctgccgtgaacatgagcatgaaattgcttggtacacggaacgttctgaaaagagctatgaattgcagacaccttttgaaattaaattggcaaagaaatttgacaccttcaatggggaatgtccaaattttgtatttcccttaaattccataatcaagactattcaaccaagggttgaaaagaaaaagcttgatggctttatgggtagaattcgatctgtctatccagttgcgtcaccaaatgaatgcaaccaaatgtgcctttcaactctcatgaagtgtgatcattgtggtgaaacttcatggcagacgggcgattttgttaaagccacttgcgaattttgtggcactgagaatttgactaaagaaggtgccactacttgtggttacttaccccaaaatgctgttgttaaaatttattgtccagcatgtcacaattcagaagtaggacctgagcatagtcttgccgaataccataatgaatctggcttgaaaaccattcttcgtaagggtggtcgcactattgcctttggaggctgtgtgttctcttatgttggttgccataacaagtgtgcctattgggttccacgtgctagcgctaacataggttgtaaccatacaggtgttgttggagaaggttccgaaggtcttaatgacaaccttcttgaaatactccaaaaagagaaagtcaacatcaatattgttggtgactttaaacttaatgaagagatcgccattattttggcatctttttctgcttccacaagtgcttttgtggaaactgtgaaaggtttggattataaagcattcaaacaaattgttgaatcctgtggtaattttaaagttacaaaaggaaaagctaaaaaaggtgcctggaatattggtgaacagaaatcaatactgagtcctctttatgcatttgcatcagaggctgctcgtgttgtacgatcaattttctcccgcactcttgaaactgctcaaaattctgtgcgtgttttacagaaggccgctataacaatactagatggaatttcacagtattcactgagactcattgatgctatgatgttcacatctgatttggctactaacaatctagttgtaatggcctacattacaggtggtgttgttcagttgacttcgcagtggctaactaacatctttggcactgtttatgaaaaactcaaacccgtccttgattggcttgaagagaagtttaaggaaggtgtagagtttcttagagacggttgggaaattgttaaatttatctcaacctgtgcttgtgaaattgtcggtggacaaattgtcacctgtgcaaaggaaattaaggagagtgttcagacattctttaagcttgtaaataaatttttggctttgtgtgctgactctatcattattggtggagctaaacttaaagccttgaatttaggtgaaacatttgtcacgcactcaaagggattgtacagaaagtgtgttaaatccagagaagaaactggcctactcatgcctctaaaagccccaaaagaaattatcttcttagagggagaaacacttcccacagaagtgttaacagaggaagttgtcttgaaaactggtgatttacaaccattagaacaacctactagtgaagctgttgaagctccattggttggtacaccagtttgtattaacgggcttatgttgctcgaaatcaaagacacagaaaagtactgtgcccttgcacctaatatgatggtaacaaacaataccttcacactcaaaggcggtgcaccaacaaaggttacttttggtgatgacactgtgatagaagtgcaaggttacaagagtgtgaatatcacttttgaacttgatgaaaggattgataaagtacttaatgagaagtgctctgcctatacagttgaactcggtacagaagtaaatgagttcgcctgtgttgtggcagatgctgtcataaaaactttgcaaccagtatctgaattacttacaccactgggcattgatttagatgagtggagtatggctacatactacttatttgatgagtctggtgagtttaaattggcttcacatatgtattgttctttttaccctccagatgaggatgaagaagaaggtgattgtgaagaagaagagtttgagccatcaactcaatatgagtatggtactgaagatgattaccaaggtaaacctttggaatttggtgccacttctgctgctcttcaacctgaagaagagcaagaagaagattggttagatgatgatagtcaacaaactgttggtcaacaagacggcagtgaggacaatcagacaactactattcaaacaattgttgaggttcaacctcaattagagatggaacttacaccagttgttcagactattgaagtgaatagttttagtggttatttaaaacttactgacaatgtatacattaaaaatgcagacattgtggaagaagctaaaaaggtaaaaccaacagtggttgttaatgcagccaatgtttaccttaaacatggaggaggtgttgcaggagccttaaataaggctactaacaatgccatgcaagttgaatctgatgattacatagctactaatggaccacttaaagtgggtggtagttgtgttttaagcggacacaatcttgctaaacactgtcttcatgttgtcggcccaaatgttaacaaaggtgaagacattcaacttcttaagagtgcttatgaaaattttaatcagcacgaagttctacttgcaccattattatcagctggtatttttggtgctgaccctatacattctttaagagtttgtgtagatactgttcgcacaaatgtctacttagctgtctttgataaaaatctctatgacaaacttgtttcaagctttttggaaatgaagagtgaaaagcaagttgaacaaaagatcgctgagattcctaaagaggaagttaagccatttataactgaaagtaaaccttcagttgaacagagaaaacaagatgataagaaaatcaaagcttgtgttgaagaagttaaaacaactctggaagaaactaagttcctcacagaaaacttgttactttatattgacattaatggcaatcttcatccagattctgccactcttgttagtgacattgacatcactttcttaaagaaagatgctccatatatagtgggtgatgttgttcaagagggtgttttaactgctgtggttatacctactaaaaaggctggtggcactactgaaatgctagcgaaagctttgagaaaagtgccaacagacaattatataaccacttacccgggtcagggtttaaatggttacactgtagaggaggcaaagacagtgcttaaaaagtgtaaaagtgccttttacattctaccatctattatctctaatgagaagcaagaaattcttggaactgtttcttggaatttgcgagaaatgcttgcacatgcagaagaaacacgcaaattaatgcctgtctgtgtggaaactaaagccatagtttcaactatacagcgtaaatataagggtattaaaatacaagagggtgtggttgattatggtgctagattttacttttacaccagtaaaacaactgtagcgtcacttatcaacacacttaacgatctaaatgaaactcttgttacaatgccacttggctatgtaacacatggcttaaatttggaagaagctgctcggtatatgagatctctcaaagtgccagctacagtttctgtttcttcacctgatgctgttacagcgtataatggttatcttacttcttcttctaaaacacctgaagaacattttattgaaaccatctcacttgctggttcctataaagattggtcctattctggacaatctacacaactaggtatagaatttcttaagagaggtgataaaagtgtatattacactagtaatcctaccacattccacctagatggtgaagttatcacctttgacaatcttaagacacttctttctttgagagaagtgaggactattaaggtgtttacaacagtagacaacattaacctccacacgcaagttgtggacatgtcaatgacatatggacaacagtttggtccaacttatttggatggagctgatgttactaaaataaaacctcataattcacatgaaggtaaaacattttatgttttacctaatgatgacactctacgtgttgaggcttttgagtactaccacacaactgatcctagttttctgggtaggtacatgtcagcattaaatcacactaaaaagtggaaatacccacaagttaatggtttaacttctattaaatgggcagataacaactgttatcttgccactgcattgttaacactccaacaaatagagttgaagtttaatccacctgctctacaagatgcttattacagagcaagggctggtgaagctgctaacttttgtgcacttatcttagcctactgtaataagacagtaggtgagttaggtgatgttagagaaacaatgagttacttgtttcaacatgccaatttagattcttgcaaaagagtcttgaacgtggtgtgtaaaacttgtggacaacagcagacaacccttaagggtgtagaagctgttatgtacatgggcacactttcttatgaacaatttaagaaaggtgttcagataccttgtacgtgtggtaaacaagctacaaaatatctagtacaacaggagtcaccttttgttatgatgtcagcaccacctgctcagtatgaacttaagcatggtacatttacttgtgctagtgagtacactggtaattaccagtgtggtcactataaacatataacttctaaagaaactttgtattgcatagacggtgctttacttacaaagtcctcagaatacaaaggtcctattacggatgttttctacaaagaaaacagttacacaacaaccataaaaccagttacttataaattggatggtgttgtttgtacagaaattgaccctaagttggacaattattataagaaagacaattcttatttcacagagcaaccaattgatcttgtaccaaaccaaccatatccaaacgcaagcttcgataattttaagtttgtatgtgataatatcaaatttgctgatgatttaaaccagttaactggttataagaaacctgcttcaagagagcttaaagttacatttttccctgacttaaatggtgatgtggtggctattgattataaacactacacaccctcttttaagaaaggagctaaattgttacataaacctattgtttggcatgttaacaatgcaactaataaagccacgtataaaccaaatacctggtgtatacgttgtctttggagcacaaaaccagttgaaacatcaaattcgtttgatgtactgaagtcagaggacgcgcagggaatggataatcttgcctgcgaagatctaaaaccagtctctgaagaagtagtggaaaatcctaccatacagaaagacgttcttgagtgtaatgtgaaaactaccgaagttgtaggagacattatacttaaaccagcaaataatagtttaaaaattacagaagaggttggccacacagatctaatggctgcttatgtagacaattctagtcttactattaagaaacctaatgaattatctagagtattaggtttgaaaacccttgctactcatggtttagctgctgttaatagtgtcccttgggatactatagctaattatgctaagccttttcttaacaaagttgttagtacaactactaacatagttacacggtgtttaaaccgtgtttgtactaattatatgccttatttctttactttattgctacaattgtgtacttttactagaagtacaaattctagaattaaagcatctatgccgactactatagcaaagaatactgttaagagtgtcggtaaattttgtctagaggcttcatttaattatttgaagtcacctaatttttctaaactgataaatattataatttggtttttactattaagtgtttgcctaggttctttaatctactcaaccgctgctttaggtgttttaatgtctaatttaggcatgccttcttactgtactggttacagagaaggctatttgaactctactaatgtcactattgcaacctactgtactggttctataccttgtagtgtttgtcttagtggtttagattctttagacacctatccttctttagaaactatacaaattaccatttcatcttttaaatgggatttaactgcttttggcttagttgcagagtggtttttggcatatattcttttcactaggtttttctatgtacttggattggctgcaatcatgcaattgtttttcagctattttgcagtacattttattagtaattcttggcttatgtggttaataattaatcttgtacaaatggccccgatttcagctatggttagaatgtacatcttctttgcatcattttattatgtatggaaaagttatgtgcatgttgtagacggttgtaattcatcaacttgtatgatgtgttacaaacgtaatagagcaacaagagtcgaatgtacaactattgttaatggtgttagaaggtccttttatgtctatgctaatggaggtaaaggcttttgcaaactacacaattggaattgtgttaattgtgatacattctgtgctggtagtacatttattagtgatgaagttgcgagagacttgtcactacagtttaaaagaccaataaatcctactgaccagtcttcttacatcgttgatagtgttacagtgaagaatggttccatccatctttactttgataaagctggtcaaaagacttatgaaagacattctctctctcattttgttaacttagacaacctgagagctaataacactaaaggttcattgcctattaatgttatagtttttgatggtaaatcaaaatgtgaagaatcatctgcaaaatcagcgtctgtttactacagtcagcttatgtgtcaacctatactgttactagatcaggcattagtgtctgatgttggtgatagtgcggaagttgcagttaaaatgtttgatgcttacgttaatacgttttcatcaacttttaacgtaccaatggaaaaactcaaaacactagttgcaactgcagaagctgaacttgcaaagaatgtgtccttagacaatgtcttatctacttttatttcagcagctcggcaagggtttgttgattcagatgtagaaactaaagatgttgttgaatgtcttaaattgtcacatcaatctgacatagaagttactggcgatagttgtaataactatatgctcacctataacaaagttgaaaacatgacaccccgtgaccttggtgcttgtattgactgtagtgcgcgtcatattaatgcgcaggtagcaaaaagtcacaacattgctttgatatggaacgttaaagatttcatgtcattgtctgaacaactacgaaaacaaatacgtagtgctgctaaaaagaataacttaccttttaagttgacatgtgcaactactagacaagttgttaatgttgtaacaacaaagatagcacttaagggtggtaaaattgttaataattggttgaagcagttaattaaagttacacttgtgttcctttttgttgctgctattttctatttaataacacctgttcatgtcatgtctaaacatactgacttttcaagtgaaatcataggatacaaggctattgatggtggtgtcactcgtgacatagcatctacagatacttgttttgctaacaaacatgctgattttgacacatggtttagccagcgtggtggtagttatactaatgacaaagcttgcccattgattgctgcagtcataacaagagaagtgggttttgtcgtgcctggtttgcctggcacgatattacgcacaactaatggtgactttttgcatttcttacctagagtttttagtgcagttggtaacatctgttacacaccatcaaaacttatagagtacactgactttgcaacatcagcttgtgttttggctgctgaatgtacaatttttaaagatgcttctggtaagccagtaccatattgttatgataccaatgtactagaaggttctgttgcttatgaaagtttacgccctgacacacgttatgtgctcatggatggctctattattcaatttcctaacacctaccttgaaggttctgttagagtggtaacaacttttgattctgagtactgtaggcacggcacttgtgaaagatcagaagctggtgtttgtgtatctactagtggtagatgggtacttaacaatgattattacagatctttaccaggagttttctgtggtgtagatgctgtaaatttacttactaatatgtttacaccactaattcaacctattggtgctttggacatatcagcatctatagtagctggtggtattgtagctatcgtagtaacatgccttgcctactattttatgaggtttagaagagcttttggtgaatacagtcatgtagttgcctttaatactttactattccttatgtcattcactgtactctgtttaacaccagtttactcattcttacctggtgtttattctgttatttacttgtacttgacattttatcttactaatgatgtttcttttttagcacatattcagtggatggttatgttcacacctttagtacctttctggataacaattgcttatatcatttgtatttccacaaagcatttctattggttctttagtaattacctaaagagacgtgtagtctttaatggtgtttcctttagtacttttgaagaagctgcgctgtgcacctttttgttaaataaagaaatgtatctaaagttgcgtagtgatgtgctattacctcttacgcaatataatagatacttagctctttataataagtacaagtattttagtggagcaatggatacaactagctacagagaagctgcttgttgtcatctcgcaaaggctctcaatgacttcagtaactcaggttctgatgttctttaccaaccaccacaaacctctatcacctcagctgttttgcagagtggttttagaaaaatggcattcccatctggtaaagttgagggttgtatggtacaagtaacttgtggtacaactacacttaacggtctttggcttgatgacgtagtttactgtccaagacatgtgatctgcacctctgaagacatgcttaaccctaattatgaagatttactcattcgtaagtctaatcataatttcttggtacaggctggtaatgttcaactcagggttattggacattctatgcaaaattgtgtacttaagcttaaggttgatacagccaatcctaagacacctaagtataagtttgttcgcattcaaccaggacagactttttcagtgttagcttgttacaatggttcaccatctggtgtttaccaatgtgctatgaggcccaatttcactattaagggttcattccttaatggttcatgtggtagtgttggttttaacatagattatgactgtgtctctttttgttacatgcaccatatggaattaccaactggagttcatgctggcacagacttagaaggtaacttttatggaccttttgttgacaggcaaacagcacaagcagctggtacggacacaactattacagttaatgttttagcttggttgtacgctgctgttataaatggagacaggtggtttctcaatcgatttaccacaactcttaatgactttaaccttgtggctatgaagtacaattatgaacctctaacacaagaccatgttgacatactaggacctctttctgctcaaactggaattgccgttttagatatgtgtgcttcattaaaagaattactgcaaaatggtatgaatggacgtaccatattgggtagtgctttattagaagatgaatttacaccttttgatgttgttagacaatgctcaggtgttactttccaaagtgcagtgaaaagaacaatcaagggtacacaccactggttgttactcacaattttgacttcacttttagttttagtccagagtactcaatggtctttgttcttttttttgtatgaaaatgcctttttaccttttgctatgggtattattgctatgtctgcttttgcaatgatgtttgtcaaacataagcatgcatttctctgtttgtttttgttaccttctcttgccactgtagcttattttaatatggtctatatgcctgctagttgggtgatgcgtattatgacatggttggatatggttgatactagtttgtctggttttaagctaaaagactgtgttatgtatgcatcagctgtagtgttactaatccttatgacagcaagaactgtgtatgatgatggtgctaggagagtgtggacacttatgaatgtcttgacactcgtttataaagtttattatggtaatgctttagatcaagccatttccatgtgggctcttataatctctgttacttctaactactcaggtgtagttacaactgtcatgtttttggccagaggtattgtttttatgtgtgttgagtattgccctattttcttcataactggtaatacacttcagtgtataatgctagtttattgtttcttaggctatttttgtacttgttactttggcctcttttgtttactcaaccgctactttagactgactcttggtgtttatgattacttagtttctacacaggagtttagatatatgaattcacagggactactcccacccaagaatagcatagatgccttcaaactcaacattaaattgttgggtgttggtggcaaaccttgtatcaaagtagccactgtacagtctaaaatgtcagatgtaaagtgcacatcagtagtcttactctcagttttgcaacaactcagagtagaatcatcatctaaattgtgggctcaatgtgtccagttacacaatgacattctcttagctaaagatactactgaagcctttgaaaaaatggtttcactactttctgttttgctttccatgcagggtgctgtagacataaacaagctttgtgaagaaatgctggacaacagggcaaccttacaagctatagcctcagagtttagttcccttccatcatatgcagcttttgctactgctcaagaagcttatgagcaggctgttgctaatggtgattctgaagttgttcttaaaaagttgaagaagtctttgaatgtggctaaatctgaatttgaccgtgatgcagccatgcaacgtaagttggaaaagatggctgatcaagctatgacccaaatgtataaacaggctagatctgaggacaagagggcaaaagttactagtgctatgcagacaatgcttttcactatgcttagaaagttggataatgatgcactcaacaacattatcaacaatgcaagagatggttgtgttcccttgaacataatacctcttacaacagcagccaaactaatggttgtcataccagactataacacatataaaaatacgtgtgatggtacaacatttacttatgcatcagcattgtgggaaatccaacaggttgtagatgcagatagtaaaattgttcaacttagtgaaattagtatggacaattcacctaatttagcatggcctcttattgtaacagctttaagggccaattctgctgtcaaattacagaataatgagcttagtcctgttgcactacgacagatgtcttgtgctgccggtactacacaaactgcttgcactgatgacaatgcgttagcttactacaacacaacaaagggaggtaggtttgtacttgcactgttatccgatttacaggatttgaaatgggctagattccctaagagtgatggaactggtactatctatacagaactggaaccaccttgtaggtttgttacagacacacctaaaggtcctaaagtgaagtatttatactttattaaaggattaaacaacctaaatagaggtatggtacttggtagtttagctgccacagtacgtctacaagctggtaatgcaacagaagtgcctgccaattcaactgtattatctttctgtgcttttgctgtagatgctgctaaagcttacaaagattatctagctagtgggggacaaccaatcactaattgtgttaagatgttgtgtacacacactggtactggtcaggcaataacagttacaccggaagccaatatggatcaagaatcctttggtggtgcatcgtgttgtctgtactgccgttgccacatagatcatccaaatcctaaaggattttgtgacttaaaaggtaagtatgtacaaatacctacaacttgtgctaatgaccctgtgggttttacacttaaaaacacagtctgtaccgtctgcggtatgtggaaaggttatggctgtagttgtgatcaactccgcgaacccatgcttcagtcagctgatgcacaatcgtttttaaacgggtttgcggtgtaagtgcagcccgtcttacaccgtgcggcacaggcactagtactgatgtcgtatacagggcttttgacatctacaatgataaagtagctggttttgctaaattcctaaaaactaattgttgtcgcttccaagaaaaggacgaagatgacaatttaattgattcttactttgtagttaagagacacactttctctaactaccaacatgaagaaacaatttataatttacttaaggattgtccagctgttgctaaacatgacttctttaagtttagaatagacggtgacatggtaccacatatatcacgtcaacgtcttactaaatacacaatggcagacctcgtctatgctttaaggcattttgatgaaggtaattgtgacacattaaaagaaatacttgtcacatacaattgttgtgatgatgattatttcaataaaaaggactggtatgattttgtagaaaacccagatatattacgcgtatacgccaacttaggtgaacgtgtacgccaagctttgttaaaaacagtacaattctgtgatgccatgcgaaatgctggtattgttggtgtactgacattagataatcaagatctcaatggtaactggtatgatttcggtgatttcatacaaaccacgccaggtagtggagttcctgttgtagattcttattattcattgttaatgcctatattaaccttgaccagggctttaactgcagagtcacatgttgacactgacttaacaaagccttacattaagtgggatttgttaaaatatgacttcacggaagagaggttaaaactctttgaccgttattttaaatattgggatcagacataccacccaaattgtgttaactgtttggatgacagatgcattctgcattgtgcaaactttaatgttttattctctacagtgttcccacttacaagttttggaccactagtgagaaaaatatttgttgatggtgttccatttgtagtttcaactggataccacttcagagagctaggtgttgtacataatcaggatgtaaatttacatagctctagacttagttttaaggaattacttgtgtatgctgctgaccctgctatgcacgctgcttctggtaatctattactagataaacgcactacgtgcttttcagtagctgcacttactaacaatgttgcttttcaaactgtcaaacccggtaattttaacaaagacttctatgactttgctgtgtctaagggtttctttaaggaaggaagttctgttgaattaaaacacttcttctttgctcaggatggtaatgctgctatcagcgattatgactactatcgttataatctaccaacaatgtgtgatatcagacaactactatttgtagttgaagttgttgataagtactttgattgttacgatggtggctgtattaatgctaaccaagtcatcgtcaacaacctagacaaatcagctggttttccatttaataaatggggtaaggctagactttattatgattcaatgagttatgaggatcaagatgcacttttcgcatatacaaaacgtaatgtcatccctactataactcaaatgaatcttaagtatgccattagtgcaaagaatagagctcgcaccgtagctggtgtctctatctgtagtactatgaccaatagacagtttcatcaaaaattattgaaatcaatagccgccactagaggagctactgtagtaattggaacaagcaaattctatggtggttggcacaacatgttaaaaactgtttatagtgatgtagaaaaccctcaccttatgggttgggattatcctaaatgtgatagagccatgcctaatatgcttagaattatggcctcacttgttcttgctcgcaaacatacaacgtgttgtagcttgtcacaccgtttctatagattagctaatgagtgtgctcaagtattgagtgaaatggtcatgtgtggcggttcactatatgttaaaccaggtggaacctcatcaggagatgccacaactgcttatgctaatagtgtttttaacatttgtcaagctgtcacggccaatgttaatgcacttttatctactgatggtaacaaaattgccgataagtatgtccgcaatttacaacacagactttatgagtgtctctatagaaatagagatgttgacacagactttgtgaatgagttttacgcatatttgcgtaaacatttctcaatgatgatactctctgacgatgctgttgtgtgtttcaatagcacttatgcatctcaaggtctagtggctagcataaagaactttaagtcagttctttattatcaaaacaatgtttttatgtctgaagcaaaatgttggactgagactgaccttactaaaggacctcatgaattttgctctcaacatacaatgctagttaaacagggtgatgattatgtgtaccttccttacccagatccatcaagaatcctaggggccggctgttttgtagatgatatcgtaaaaacagatggtacacttatgattgaacggttcgtgtctttagctatagatgcttacccacttactaaacatcctaatcaggagtatgctgatgtctttcatttgtacttacaatacataagaaagctacatgatgagttaacaggacacatgttagacatgtattctgttatgcttactaatgataacacttcaaggtattgggaacctgagttttatgaggctatgtacacaccgcatacagtcttacaggctgttggggcttgtgttctttgcaattcacagacttcattaagatgtggtgcttgcatacgtagaccattcttatgttgtaaatgctgttacgaccatgtcatatcaacatcacataaattagtcttgtctgttaatccgtatgtttgcaatgctccaggttgtgatgtcacagatgtgactcaactttacttaggaggtatgagctattattgtaaatcacataaaccacccattagttttccattgtgtgctaatggacaagtttttggtttatataaaaatacatgtgttggtagcgataatgttactgactttaatgcaattgcaacatgtgactggacaaatgctggtgattacattttagctaacacctgtactgaaagactcaagctttttgcagcagaaacgctcaaagctactgaggagacatttaaactgtcttatggtattgctactgtacgtgaagtgctgtctgacagagaattacatctttcatgggaagttggtaaacctagaccaccacttaaccgaaattatgtctttactggttatcgtgtaactaaaaacagtaaagtacaaataggagagtacacctttgaaaaaggtgactatggtgatgctgttgtttaccgaggtacaacaacttacaaattaaatgttggtgattattttgtgctgacatcacatacagtaatgccattaagtgcacctacactagtgccacaagagcactatgttagaattactggcttatacccaacactcaatatctcagatgagttttctagcaatgttgcaaattatcaaaaggttggtatgcaaaagtattctacactccagggaccacctggtactggtaagagtcattttgctattggcctagctctctactacccttctgctcgcatagtgtatacagcttgctctcatgccgctgttgatgcactatgtgagaaggcattaaaatatttgcctatagataaatgtagtagaattatacctgcacgtgctcgtgtagagtgttttgataaattcaaagtgaattcaacattagaacagtatgtcttttgtactgtaaatgcattgcctgagacgacagcagatatagttgtctttgatgaaatttcaatggccacaaattatgatttgagtgttgtcaatgccagattacgtgctaagcactatgtgtacattggcgaccctgctcaattacctgcaccacgcacattgctaactaagggcacactagaaccagaatatttcaattcagtgtgtagacttatgaaaactataggtccagacatgttcctcggaacttgtcggcgttgtcctgctgaaattgttgacactgtgagtgctttggtttatgataataagcttaaagcacataaagacaaatcagctcaatgctttaaaatgttttataagggtgttatcacgcatgatgtttcatctgcaattaacaggccacaaataggcgtggtaagagaattccttacacgtaaccctgcttggagaaaagctgtctttatttcaccttataattcacagaatgctgtagcctcaaagattttgggactaccaactcaaactgttgattcatcacagggctcagaatatgactatgtcatattcactcaaaccactgaaacagctcactcttgtaatgtaaacagatttaatgttgctattaccagagcaaaagtaggcatactttgcataatgtctgatagagacctttatgacaagttgcaatttacaagtcttgaaattccacgtaggaatgtggcaactttacaagctgaaaatgtaacaggactctttaaagattgtagtaaggtaatcactgggttacatcctacacaggcacctacacacctcagtgttgacactaaattcaaaactgaaggtttatgtgttgacatacctggcatacctaaggacatgacctatagaagactcatctctatgatgggttttaaaatgaattatcaagttaatggttaccctaacatgtttatcacccgcgaagaagctataagacatgtacgtgcatggattggcttcgatgtcgaggggtgtcatgctactagagaagctgttggtaccaatttacctttacagctaggtttttctacaggtgttaacctagttgctgtacctacaggttatgttgatacacctaataatacagatttttccagagttagtgctaaaccaccgcctggagatcaatttaaacacctcataccacttatgtacaaaggacttccttggaatgtagtgcgtataaagattgtacaaatgttaagtgacacacttaaaaatctctctgacagagtcgtatttgtcttatgggcacatggctttgagttgacatctatgaagtattttgtgaaaataggacctgagcgcacctgttgtctatgtgatagacgtgccacatgcttttccactgcttcagacacttatgcctgttggcatcattctattggatttgattacgtctataatccgtttatgattgatgttcaacaatggggttttacaggtaacctacaaagcaaccatgatctgtattgtcaagtccatggtaatgcacatgtagctagttgtgatgcaatcatgactaggtgtctagctgtccacgagtgctttgttaagcgtgttgactggactattgaatatcctataattggtgatgaactgaagattaatgcggcttgtagaaaggttcaacacatggttgttaaagctgcattattagcagacaaattcccagttcttcacgacattggtaaccctaaagctattaagtgtgtacctcaagctgatgtagaatggaagttctatgatgcacagccttgtagtgacaaagcttataaaatagaagaattattctattcttatgccacacattctgacaaattcacagatggtgtatgcctattttggaattgcaatgtcgatagatatcctgctaattccattgtttgtagatttgacactagagtgctatctaaccttaacttgcctggttgtgatggtggcagtttgtatgtaaataaacatgcattccacacaccagcttttgataaaagtgcttttgttaatttaaaacaattaccatttttctattactctgacagtccatgtgagtctcatggaaaacaagtagtgtcagatatagattatgtaccactaaagtctgctacgtgtataacacgttgcaatttaggtggtgctgtctgtagacatcatgctaatgagtacagattgtatctcgatgcttataacatgatgatctcagctggctttagcttgtgggtttacaaacaatttgatacttataacctctggaacacttttacaagacttcagagtttagaaaatgtggcttttaatgttgtaaataagggacactttgatggacaacagggtgaagtaccagtttctatcattaataacactgtttacacaaaagttgatggtgttgatgtagaattgtttgaaaataaaacaacattacctgttaatgtagcatttgagctttgggctaagcgcaacattaaaccagtaccagaggtgaaaatactcaataatttgggtgtggacattgctgctaatactgtgatctgggactacaaaagagatgctccagcacatatatctactattggtgtttgttctatgactgacatagccaagaaaccaactgaaacgatttgtgcaccactcactgtcttttttgatggtagagttgatggtcaagtagacttatttagaaatgcccgtaatggtgttcttattacagaaggtagtgttaaaggtttacaaccatctgtaggtcccaaacaagctagtcttaatggagtcacattaattggagaagccgtaaaaacacagttcaattattataagaaagttgatggtgttgtccaacaattacctgaaacttactttactcagagtagaaatttacaagaatttaaacccaggagtcaaatggaaattgatttcttagaattagctatggatgaattcattgaacggtataaattagaaggctatgccttcgaacatatcgtttatggagattttagtcatagtcagttaggtggtttacatctactgattggactagctaaacgttttaaggaatcaccttttgaattagaagattttattcctatggacagtacagttaaaaactatttcataacagatgcgcaaacaggttcatctaagtgtgtgtgttctgttattgatttattacttgatgattttgttgaaataataaaatcccaagatttatctgtagtttctaaggttgtcaaagtgactattgactatacagaaatttcatttatgctttggtgtaaagatggccatgtagaaacattttacccaaaattacaatctagtcaagcgtggcaaccgggtgttgctatgcctaatctttacaaaatgcaaagaatgctattagaaaagtgtgaccttcaaaattatggtgatagtgcaacattacctaaaggcataatgatgaatgtcgcaaaatatactcaactgtgtcaatatttaaacacattaacattagctgtaccctataatatgagagttatacattttggtgctggttctgataaaggagttgcaccaggtacagctgttttaagacagtggttgcctacgggtacgctgcttgtcgactcagatcttaatgactttgtctctgatgcagattcaactttgattggtgattgtgcaactgtacatacagctaataaatgggatctcattattagtgatatgtacgaccctaagactaaaaatgttacaaaagaaaatgactctaaagagggttttttcacttacatttgtgggtttatacaacaaaagctagctcttggaggttccgtggctataaagataacagaacattcttggaatgctgatctttataagctcatgggacacttcgcatggtggacagcctttgttactaatgtgaatgcgtcatcatctgaagcatttttaattggatgtaattatcttggcaaaccacgcgaacaaatagatggttatgtcatgcatgcaaattacatattttggaggaatacaaatccaattcagttgtcttcctattctttatttgacatgagtaaatttccccttaaattaaggggtactgctgttatgtctttaaaagaaggtcaaatcaatgatatgattttatctcttcttagtaaaggtagacttataattagagaaaacaacagagttgttatttctagtgatgttcttgttaacaactaaacgaacaatgtttgtttttcttgttttattgccactagtctctagtcagtgtgttaatcttacaaccagaactcaattaccccctgcatacactaattctttcacacgtggtgtttattaccctgacaaagttttcagatcctcagttttacattcaactcaggacttgttcttacctttcttttccaatgttacttggttccatgctatacatgtctctgggaccaatggtactaagaggtttgataaccctgtcctaccatttaatgatggtgtttattttgcttccactgagaagtctaacataataagaggctggatttttggtactactttagattcgaagacccagtccctacttattgttaataacgctactaatgttgttattaaagtctgtgaatttcaattttgtaatgatccatttttgggtgtttattaccacaaaaacaacaaaagttggatggaaagtgagttcagagtttattctagtgcgaataattgcacttttgaatatgtctctcagccttttcttatggaccttgaaggaaaacagggtaatttcaaaaatcttagggaatttgtgtttaagaatattgatggttattttaaaatatattctaagcacacgcctattaatttagtgcgtgatctccctcagggtttttcggctttagaaccattggtagatttgccaataggtattaacatcactaggtttcaaactttacttgctttacatagaagttatttgactcctggtgattcttcttcaggttggacagctggtgctgcagcttattatgtgggttatcttcaacctaggacttttctattaaaatataatgaaaatggaaccattacagatgctgtagactgtgcacttgaccctctctcagaaacaaagtgtacgttgaaatccttcactgtagaaaaaggaatctatcaaacttctaactttagagtccaaccaacagaatctattgttagatttcctaatattacaaacttgtgcccttttggtgaagtttttaacgccaccagatttgcatctgtttatgcttggaacaggaagagaatcagcaactgtgttgctgattattctgtcctatataattccgcatcattttccacttttaagtgttatggagtgtctcctactaaattaaatgatctctgctttactaatgtctatgcagattcatttgtaattagaggtgatgaagtcagacaaatcgctccagggcaaactggaaagattgctgattataattataaattaccagatgattttacaggctgcgttatagcttggaattctaacaatcttgattctaaggttggtggtaattataattacctgtatagattgtttaggaagtctaatctcaaaccttttgagagagatatttcaactgaaatctatcaggccggtagcacaccttgtaatggtgttgaaggttttaattgttactttcctttacaatcatatggtttccaacccactaatggtgttggttaccaaccatacagagtagtagtactttcttttgaacttctacatgcaccagcaactgtttgtggacctaaaaagtctactaatttggttaaaaacaaatgtgtcaatttcaacttcaatggtttaacaggcacaggtgttcttactgagtctaacaaaaagtttctgcctttccaacaatttggcagagacattgctgacactactgatgctgtccgtgatccacagacacttgagattcttgacattacaccatgttcttttggtggtgtcagtgttataacaccaggaacaaatacttctaaccaggttgctgttctttatcagggtgttaactgcacagaagtccctgttgctattcatgcagatcaacttactcctacttggcgtgtttattctacaggttctaatgtttttcaaacacgtgcaggctgtttaataggggctgaacatgtcaacaactcatatgagtgtgacatacccattggtgcaggtatatgcgctagttatcagactcagactaattctcctcggcgggcacgtagtgtagctagtcaatccatcattgcctacactatgtcacttggtgcagaaaattcagttgcttactctaataactctattgccatacccacaaattttactattagtgttaccacagaaattctaccagtgtctatgaccaagacatcagtagattgtacaatgtacatttgtggtgattcaactgaatgcagcaatcttttgttgcaatatggcagtttttgtacacaattaaaccgtgctttaactggaatagctgttgaacaagacaaaaacacccaagaagtttttgcacaagtcaaacaaatttacaaaacaccaccaattaaagattttggtggttttaatttttcacaaatattaccagatccatcaaaaccaagcaagaggtcatttattgaagatctacttttcaacaaagtgacacttgcagatgctggcttcatcaaacaatatggtgattgccttggtgatattgctgctagagacctcatttgtgcacaaaagtttaacggccttactgttttgccacctttgctcacagatgaaatgattgctcaatacacttctgcactgttagcgggtacaatcacttctggttggacctttggtgcaggtgctgcattacaaataccatttgctatgcaaatggcttataggtttaatggtattggagttacacagaatgttctctatgagaaccaaaaattgattgccaaccaatttaatagtgctattggcaaaattcaagactcactttcttccacagcaagtgcacttggaaaacttcaagatgtggtcaaccaaaatgcacaagctttaaacacgcttgttaaacaacttagctccaattttggtgcaatttcaagtgttttaaatgatatcctttcacgtcttgacaaagttgaggctgaagtgcaaattgataggttgatcacaggcagacttcaaagtttgcagacatatgtgactcaacaattaattagagctgcagaaatcagagcttctgctaatcttgctgctactaaaatgtcagagtgtgtacttggacaatcaaaaagagttgatttttgtggaaagggctatcatcttatgtccttccctcagtcagcacctcatggtgtagtcttcttgcatgtgacttatgtccctgcacaagaaaagaacttcacaactgctcctgccatttgtcatgatggaaaagcacactttcctcgtgaaggtgtctttgtttcaaatggcacacactggtttgtaacacaaaggaatttttatgaaccacaaatcattactacagacaacacatttgtgtctggtaactgtgatgttgtaataggaattgtcaacaacacagtttatgatcctttgcaacctgaattagactcattcaaggaggagttagataaatattttaagaatcatacatcaccagatgttgatttaggtgacatctctggcattaatgcttcagttgtaaacattcaaaaagaaattgaccgcctcaatgaggttgccaagaatttaaatgaatctctcatcgatctccaagaacttggaaagtatgagcagtatataaaatggccatggtacatttggctaggttttatagctggcttgattgccatagtaatggtgacaattatgctttgctgtatgaccagttgctgtagttgtctcaagggctgttgttcttgtggatcctgctgcaaatttgatgannncgnctntgagccagtgctcaaaggagtcaaattacattacacataaacgaacttatggatttgtttatgagaatcttcacaattggaactgtaactttgaagcaaggtgaaatcaaggatgctactccttcagattttgttcgcgctactgcaacgataccgatacaagcctcactccctttcggatggcttattgttggcgttgcacttcttgctgtttttcagagcgcttccaaaatcataaccctcaaaaagagatggcaactagcactctccaagggtgttcactttgtttgcaacttgctgttgttgtttgtaacagtttactcacaccttttgctcgttgctgctggccttgaagccccttttctctatctttatgctttagtctacttcttgcagagtataaactttgtaagaataataatgaggctttggctttgctggaaatgccgttccaaaaacccattactttatgatgccaactattttctttgctggcatactaattgttacgactattgtataccttacaatagtgtaacttcttcaattgtcattacttcaggtgatggcacaacaagtcctatttctgaacatgactaccagattggtggttatactgaaaaatgggaatctggagtaaaagactgtgttgtattacacagttacttcacttcagactattaccagctgtactcaactcaattgagtacagacactggtgttgaacatgttaccttcttcatctacaataaaattgttgatgagcctgaagaacatgtccaaattcacacaatcgacggttcatccggagttgttaatccagtaatggaaccaatttatgatgaaccgacgacgactactagcgtgcctttgtaagcacaagctgatgagtacgaacttatgtactcattcgtttcggaagagacaggtacgttaatagttaatagcgtacttctttttcttgctttcgtggtattcttgctagttacactagccatccttactgcgcttcgattgtgtgcgtactgctgcaatattgttaacgtgagtcttgtaaaaccttctttttacgtttactctcgtgttaaaaatctgaattcttctagagttcctgatcttccggtctaaacgaactaaatattatattagtttttctgtttggaactttaattttagccatggcagattccaacggtactattaccgttgaagagcttaaaaagctccttgaacaatggaacctagtaataggtttcctattccttacatggatttgtcttctacaatttgcctatgccaacaggaataggtttttgtatataattaagttaattttcctctggctgttatggccagtaactttagcttgttttgtgcttgctgctgtttacagaataaattggatcaccggtggaattgctatcgcaatggcttgtcttgtaggcttgatgtggctcagctacttcattgcttctttcagactgtttgcgcgtacgcgttccatgtggtcattcaatccagaaactaacattcttctcaacgtgccactccatggcactattctgaccagaccgcttctagaaagtgaactcgtaatcggagctgtgatccttcgtggacatcttcgtattgctggacaccatctaggacgctgtgacatcaaggacctgcctaaagaaatcactgttgctacatcacgaacgctttcttattacaaattgggagcttcgcagcgtgtagcaggtgactcaggttttgctgcatacagtcgctacaggattggcaactataaattaaacacagaccattccagtagcagtgacaatattgctttgcttgtacagtaagtgacaacagatgtttcatctcgttgactttcaggttactatagcagagatattactaattattatgaggacttttaaagtttccatttggaatcttgattacatcataaacctcataattaaaaatttatctaagtcactaactgagaataaatattctcaattagatgaagagcaaccaatggagattgattaaacgaacatgaaaattattcttttcttggcactgataacactcgctacttgtgagctttatcactaccaagagtgtgttagaggtacaacagtacttttaaaagaaccttgctcttctggaacatacgagggcaattcaccatttcatcctctagctgataacaaatttgcactgacttgctttagcactcaatttgcttttgcttgtcctgacggcgtaaaacacgtctatcagttacgtgccagatcagtttcacctaaactgttcatcagacaagaggaagttcaagaactttactctccaatttttcttattgttgcggcaatagtgtttataacactttgcttcacactcaaaagaaagacagaatgattgaactttcattaattgacttctatttgtgctttttagcctttctgctattccttgttttaattatgcttattatcttttggttctcacttgaactgcaagatcataatgaaacttgtcacgcctaaacgaacatgaaatttcttgttttcttaggaatcatcacaactgtagctgcatttcaccaagaatgtagtttacagtcatgtactcaacatcaaccatatgtagttgatgacccgtgtcctattcacttctattctaaatggtatattagagtaggagctagaaaatcagcacctttaattgaattgtgcgtggatgaggctggttctaaatcacccattcagtacatcgatatcggtaattatacagtttcctgtttaccttttacaattaattgccaggaacctaaattgggtagtcttgtagtgcgttgttcgttctatgaagactttttagagtatcatgacgttcgtgttgttttagatttcatctaaacgaacaaactaaaatgtctgataatggaccccaaaatcagcgaaatgcaccccgcattacgtttggtggaccctcagattcaactggcagtaaccagaatggagaacgcagtggggcgcgatcaaaacaacgtcggccccaaggtttacccaataatactgcgtcttggttcaccgctctcactcaacatggcaaggaagaccttaaattccctcgaggacaaggcgttccaattaacaccaatagcagtccagatgaccaaattggctactaccgaagagctaccagacgaattcgtggtggtgacggtaaaatgaaagatctcagtccaagatggtatttctactacctaggaactgggccagaagctggacttccctatggtgctaacaaagacggcatcatatgggttgcaactgagggagccttgaatacaccaaaagatcacattggcacccgcaatcctgctaacaatgctgcaatcgtgctacaacttcctcaaggaacaacattgccaaaaggcttctacgcagaagggagcagaggcggcagtcaagcctcttctcgttcctcatcacgtagtcgcaacagttcaagaaattcaactccaggcagcagtaggggaacttctcctgctagaatggctggcaatggcggtgatgctgctcttgctttgctgctgcttgacagattgaaccagcttgagagcaaaatgtctggtaaaggccaacaacaacaaggccaaactgtcactaagaaatctgctgctgaggcttctaagaagcctcggcaaaaacgtactgccactaaagcatacaatgtaacacaagctttcggcagacgtggtccagaacaaacccaaggaaattttggggaccaggaactaatcagacaaggaactgattacaaacattggccgcaaattgcacaatttgcccccagcgcttcagcgttcttcggaatgtcgcgcattggcatggaagtcacaccttcgggaacgtggttgacctacacaggtgccatcaaattggatgacaaagatccaaatttcaaagatcaagtcattttgctgaataagcatattgacgcatacaaaacattcccaccaacagagcctaaaaaggacaaaaagaagaaggctgatgaaactcaagccttaccgcagagacagaagaaacagcaaactgtgactcttcttcctgctgcagatttggatgatttctccaaacaattgcaacaatccatgagcagtgctgactcaactcaggcctaaactcatgcagaccacacaaggcagatgggctatataaacgttttcgcttttccgtttacgatatatagtctactcttgtgcagaatgaattctcgtaactacatagcacaagtagatgtagttaactttaatctcacatagcaatctttaatcagtgtgtaacattagggaggacttgaaagagccaccacattttcaccgaggccacgcggagtacgatcgagtgtacagtgaacaatgctagggagagctgcctatatggaagagccctaatgtgtaaaattaattttagtagtgctatccccatgtg

SEQ ID NO: 61 - DNA, 29809 bp, synthetic construct
  misc_feature 1..29809: note = Reconstituted virus 24
  source 1..29809: mol_type = other DNA
accaactttcgatctcttgtagatctgttctctaaacgaactttaaaatctgtgtggctgtcactcggctgcatgcttagtgcactcacgcagtataattaataactaattactgtcgttgacaggacacgagtaactcgtctatcttctgcaggctgcttacggtttcgtccgtgttgcagccgatcatcagcacatctaggttttgtccgggtgtgaccgaaaggtaagatggagagccttgtccctggtttcaacgagaaaacacacgtccaactcagtttgcctgttttacaggttcgcgacgtgctcgtacgtggctttggagactccgtggaggaggtcttatcagaggcacgtcaacatcttaaagatggcacttgtggcttagtagaagttgaaaaaggcgttttgcctcaacttgaacagccctatgtgttcatcaaacgttcggatgctcgaactgcacctcatggtcatgttatggttgagctggtagcagaactcgaaggcattcagtacggtcgtagtggtgagacacttggtgtccttgtccctcatgtgggcgaaataccagtggcttaccgcaaggttcttcttcgtaagaacggtaataaaggagctggtggccatagttacggcgccgatctaaagtcatttgacttaggcgacgagcttggcactgatccttatgaagattttcaagaaaactggaacactaaacatagcagtggtgttacccgtgaactcatgcgtgagcttaacggaggggcatacactcgctatgtcgataacaacttctgtggccctgatggctaccctcttgagtgcattaaagaccttctagcacgtgctggtaaagcttcatgcactttgtccgaacaactggactttattgacactaagaggggtgtatactgctgccgtgaacatgagcatgaaattgcttggtacacggaacgttctgaaaagagctatgaattgcagacaccttttgaaattaaattggcaaagaaatttgacaccttcaatggggaatgtccaaattttgtatttcccttaaattccataatcaagactattcaaccaagggttgaaaagaaaaagcttgatggctttatgggtagaattcgatctgtctatccagttgcgtcaccaaatgaatgcaaccaaatgtgcctttcaactctcatgaagtgtgatcattgtggtgaaacttcatggcagacgggcgattttgttaaagccacttgcgaattttgtggcactgagaatttgactaaagaaggtgccactacttgtggttacttaccccaaaatgctgttgttaaaatttattgtccagcatgtcacaattcagaagtaggacctgagcatagtcttgccgaataccataatgaatctggcttgaaaaccattcttcgtaagggtggtcgcactattgcctttggaggctgtgtgttctcttatgttggttgccataacaagtgtgcctattgggttccacgtgctagcgctaacataggttgtaaccatacaggtgttgttggagaaggttccgaaggtcttaatgacaaccttcttgaaatactccaaaaagagaaagtcaacatcaatattgttggtgactttaaacttaatgaagagatcgccattattttggcatctttttctgcttccacaagtgcttttgtggaaactgtgaaaggtttggattataaagcattcaaacaaattgttgaatcctgtggtaattttaaagttacaaaaggaaaagctaaaaaaggtgcctggaatattggtgaacagaaatcaatactgagtcctctttatgcatttgcatcagaggctgctcgtgttgtacgatcaattttctcccgcactcttgaaactgctcaaaattctgtgcgtgttttacagaaggccgctataacaatactagatggaatttcacagtattcactgagactcattgatgctatgatgttcacatctgatttggctactaacaatctagttgtaatggcctacattacaggtggtgttgttcagttgacttcgcagtggctaactaacatctttggcactgtttatgaaaaactcaaacccgtccttgattggcttgaagagaagtttaaggaaggtgtagagtttcttagagacggttgggaaattgttaaatttatctcaacctgtgcttgtgaaattgtcggtggacaaattgtcacctgtgcaaaggaaattaaggagagtgttcagacattctttaagcttgtaaataaatttttggctttgtgtgctgactctatcattattggtggagctaaacttaaagccttgaatttaggtgaaacatttgtcacgcactcaaagggattgtacagaaagtgtgttaaatccagagaagaaactggcctactcatgcctctaaaagccccaaaagaaattatcttcttagagggagaaacacttcccacagaagtgttaacagaggaagttgtcttgaaaactggtgatttacaaccattagaacaacctactagtgaagctgttgaagctccattggttggtacaccagtttgtattaacgggcttatgttgctcgaaatcaaagacacagaaaagtactgtgcccttgcacctaatatgatggtaacaaacaataccttcacactcaaaggcggtgcaccaacaaaggttacttttggtgatgacactgtgatagaagtgcaaggttacaagagtgtgaatatcacttttgaacttgatgaaaggattgataaagtacttaatgagaagtgctctgcctatacagttgaactcggtacagaagtaaatgagttcgcctgtgttgtggcagatgctgtcataaaaactttgcaaccagtatctgaattacttacaccactgggcattgatttagatgagtggagtatggctacatactacttatttgatgagtctggtgagtttaaattggcttcacatatgtattgttctttttaccctccagatgaggatgaagaagaaggtgattgtgaagaagaagagtttgagccatcaactcaatatgagtatggtactgaagatgattaccaaggtaaacctttggaatttggtgccacttctgctgctcttcaacctgaagaagagcaagaagaagattggttagatgatgatagtcaacaaactgttggtcaacaagacggcagtgaggacaatcagacaactactattcaaacaattgttgaggttcaacctcaattagagatggaacttacaccagttgttcagactattgaagtgaatagttttagtggttatttaaaacttactgacaatgtatacattaaaaatgcagacattgtggaagaagctaaaaaggtaaaaccaacagtggttgttaatgcagccaatgtttaccttaaacatggaggaggtgttgcaggagccttaaataaggctactaacaatgccatgcaagttgaatctgatgattacatagctactaatggaccacttaaagtgggtggtagttgtgttttaagcggacacaatcttgctaaacactgtcttcatgttgtcggcccaaatgttaacaaaggtgaagacattcaacttcttaagagtgcttatgaaaattttaatcagcacgaagttctacttgcaccattattatcagctggtatttttggtgctgaccctatacattctttaagagtttgtgtagatactgttcgcacaaatgtctacttagctgtctttgataaaaatctctatgacaaacttgtttcaagctttttggaaatgaagagtgaaaagcaagttgaacaaaagatcgctgagattcctaaagaggaagttaagccatttataactgaaagtaaaccttcagttgaacagagaaaacaagatgataagaaaatcaaagcttgtgttgaagaagttacaacaactctggaagaaactaagttcctcacagaaaacttgttactttatattgacattaatggcaatcttcatccagattctgccactcttgttagtgacattgacatcactttcttaaagaaagatgctccatatatagtgggtgatgttgttcaagagggtgttttaactgctgtggttatacctactaaaaaggctggtggcactactgaaatgctagcgaaagctttgagaaaagtgccaacagacaattatataaccacttacccgggtcagggtttaaatggttacactgtagaggaggcaaagacagtgcttaaaaagtgtaaaagtgccttttacattctaccatctattatctctaatgagaagcaagaaattcttggaactgtttcttggaatttgcgagaaatgcttgcacatgcagaagaaacacgcaaattaatgcctgtctgtgtggaaactaaagccatagtttcaactatacagcgtaaatataagggtattaaaatacaagagggtgtggttgattatggtgctagattttacttttacaccagtaaaacaactgtagcgtcacttatcaacacacttaacgatctaaatgaaactcttgttacaatgccacttggctatgtaacacatggcttaaatttggaagaagctgctcggtatatgagatctctcaaagtgccagctacagtttctgtttcttcacctgatgctgttacagcgtataatggttatcttacttcttcttctaaaacacctgaagaacattttattgaaaccatctcacttgctggttcctataaagattggtcctattctggacaatctacacaactaggtatagaatttcttaagagaggtgataaaagtgtatattacactagtaatcctaccacattccacctagatggtgaagttatcacctttgacaatcttaagacacttctttctttgagagaagtgaggactattaaggtgtttacaacagtagacaacattaacctccacacgcaagttgtggacatgtcaatgacatatggacaacagtttggtccaacttatttggatggagctgatgttactaaaataaaacctcataattcacatgaaggtaaaacattttatgttttacctaatgatgacactctacgtgttgaggcttttgagtactaccacacaactgatcctagttttctgggtaggtacatgtcagcattaaatcacactaaaaagtggaaatacccacaagttaatggtttaacttctattaaatgggcagataacaactgttatcttgccactgcattgttaacactccaacaaatagagttgaagtttaatccacctgctctacaagatgcttattacagagcaagggctggtgaagctgctaacttttgtgcacttatcttagcctactgtaataagacagtaggtgagttaggtgatgttagagaaacaatgagttacttgtttcaacatgccaatttagattcttgcaaaagagtcttgaacgtggtgtgtaaaacttgtggacaacagcagacaacccttaagggtgtagaagctgttatgtacatgggcacactttcttatgaacaatttaagaaaggtgttcagataccttgtacgtgtggtaaacaagctacaaaatatctagtacaacaggagtcaccttttgttatgatgtcagcaccacctgctcagtatgaacttaagcatggtacatttacttgtgctagtgagtacactggtaattaccagtgtggtcactataaacatataacttctaaagaaactttgtattgcatagacggtgctttacttacaaagtcctcagaatacaaaggtcctattacggatgttttctacaaagaaaacagttacacaacaaccataaaaccagttacttataaattggatggtgttgtttgtacagaaattgaccctaagttggacaattattataagaaagacaattcttatttcacagagcaaccaattgatcttgtaccaaaccaaccatatccaaacgcaagcttcgataattttaagtttgtatgtgataatatcaaatttgctgatgatttaaaccagttaactggttataagaaacctgcttcaagagagcttaaagttacatttttccctgacttaaatggtgatgtggtggctattgattataaacactacacaccctcttttaagaaaggagctaaattgttacataaacctattgtttggcatgttaacaatgcaactaataaagccacgtataaaccaaatacctggtgtatacgttgtctttggagcacaaaaccagttgaaacatcaaattcgtttgatgtactgaagtcagaggacgcgcagggaatggataatcttgcctgcgaagatctaaaaccagtctctgaagaagtagtggaaaatcctaccatacagaaagacgttcttgagtgtaatgtgaaaactaccgaagttgtaggagacattatacttaaaccagcaaataatagtttaaaaattacagaagaggttggccacacagatctaatggctgcttatgtagacaattctagtcttactattaagaaacctaatgaattatctagagtattaggtttgaaaacccttgctactcatggtttagctgctgttaatagtgtcccttgggatactatagctaattatgctaagccttttcttaacaaagttgttagtacaactactaacatagttacacggtgtttaaaccgtgtttgtactaattatatgccttatttctttactttattgctacaattgtgtacttttactagaagtacaaattctagaattaaagcatctatgccgactactatagcaaagaatactgttaagagtgtcggtaaattttgtctagaggcttcatttaattatttgaagtcacctaatttttctaaactgataaatattataatttggtttttactattaagtgtttgcctaggttctttaatctactcaaccgctgctttaggtgttttaatgtctaatttaggcatgccttcttactgtactggttacagagaaggctatttgaactctactaatgtcactattgcaacctactgtactggttctataccttgtagtgtttgtcttagtggtttagattctttagacacctatccttctttagaaactatacaaattaccatttcatcttttaaatgggatttaactgcttttggcttagttgcagagtggtttttggcatatattcttttcactaggtttttctatgtacttggattggctgcaatcatgcaattgtttttcagctattttgcagtacattttattagtaattcttggcttatgtggttaataattaatcttgtacaaatggccccgatttcagctatggttagaatgtacatcttctttgcatcattttattatgtatggaaaagttatgtgcatgttgtagacggttgtaattcatcaacttgtatgatgtgttacaaacgtaatagagcaacaagagtcgaatgtacaactattgttaatggtgttagaaggtccttttatgtctatgctaatggaggtaaaggcttttgcaaactacacaattggaattgtgttaattgtgatacattctgtgctggtagtacatttattagtgatgaagttgcgagagacttgtcactacagtttaaaagaccaataaatcctactgaccagtcttcttacatcgttgatagtgttacagtgaagaatggttccatccatctttactttgataaagctggtcaaaagacttatgaaagacattctctctctcattttgttaacttagacaacctgagagctaataacactaaaggttcattgcctattaatgttatagtttttgatggtaaatcaaaatgtgaagaatcatctgcaaaatcagcgtctgtttactacagtcagcttatgtgtcaacctatactgttactagatcaggcattagtgtctgatgttggtgatagtgcggaagttgcagttaaaatgtttgatgcttacgttaatacgttttcatcaacttttaacgtaccaatggaaaaactcaaaacactagttgcaactgcagaagctgaacttgcaaagaatgtgtccttagacaatgtcttatctacttttatttcagcagctcggcaagggtttgttgattcagatgtagaaactaaagatgttgttgaatgtcttaaattgtcacatcaatctgacatagaagttactggcgatagttgtaataactatatgctcacctataacaaagttgaaaacatgacaccccgtgaccttggtgcttgtattgactgtagtgcgcgtcatattaatgcgcaggtagcaaaaagtcacaacattgctttgatatggaacgttaaagatttcatgtcattgtctgaacaactacgaaaacaaatacgtagtgctgctaaaaagaataacttaccttttaagttgacatgtgcaactactagacaagttgttaatgttgtaacaacaaagatagcacttaagggtggtaaaattgttaataattggttgaagcagttaattaaagttacacttgtgttcctttttgttgctgctattttctatttaataacacctgttcatgtcatgtctaaacatactgacttttcaagtgaaatcataggatacaaggctattgatggtggtgtcactcgtgacatagcatctacagatacttgttttgctaacaaacatgctgattttgacacatggtttagccagcgtggtggtagttatactaatgacaaagcttgcccattgattgctgcagtcataacaagagaagtgggttttgtcgtgcctggtttgcctggcacgatattacgcacaactaatggtgactttttgcatttcttacctagagtttttagtgcagttggtaacatctgttacacaccatcaaaacttatagagtacactgactttgcaacatcagcttgtgttttggctgctgaatgtacaatttttaaagatgcttctggtaagccagtaccatattgttatgataccaatgtactagaaggttctgttgcttatgaaagtttacgccctgacacacgttatgtgctcatggatggctctattattcaatttcctaacacctaccttgaaggttctgttagagtggtaacaacttttgattctgagtactgtaggcacggcacttgtgaaagatcagaagctggtgtttgtgtatctactagtggtagatgggtacttaacaatgattattacagatctttaccaggagttttctgtggtgtagatgctgtaaatttacttactaatatgtttacaccactaattcaacctattggtgctttggacatatcagcatctatagtagctggtggtattgtagctatcgtagtaacatgccttgcctactattttatgaggtttagaagagcttttggtgaatacagtcatgtagttgcctttaatactttactattccttatgtcattcactgtactctgtttaacaccagtttactcattcttacctggtgtttattctgttatttacttgtacttgacattttatcttactaatgatgtttcttttttagcacatattcagtggatggttatgttcacacctttagtacctttctggataacaattgcttatatcatttgtatttccacaaagcatttctattggttctttagtaattacctaaagagacgtgtagtctttaatggtgtttcctttagtacttttgaagaagctgcgctgtgcacctttttgttaaataaagaaatgtatctaaagttgcgtagtgatgtgctattacctcttacgcaatataatagatacttagctctttataataagtacaagtattttagtggagcaatggatacaactagctacagagaagctgcttgttgtcatctcgcaaaggctctcaatgacttcagtaactcaggttctgatgttctttaccaaccaccacaaacctctatcacctcagctgttttgcagagtggttttagaaaaatggcattcccatctggtaaagttgagggttgtatggtacaagtaacttgtggtacaactacacttaacggtctttggcttgatgacgtagtttactgtccaagacatgtgatctgcacctctgaagacatgcttaaccctaattatgaagatttactcattcgtaagtctaatcataatttcttggtacaggctggtaatgttcaactcagggttattggacattctatgcaaaattgtgtacttaagcttaaggttgatacagccaatcctaagacacctaagtataagtttgttcgcattcaaccaggacagactttttcagtgttagcttgttacaatggttcaccatctggtgtttaccaatgtgctatgaggcccaatttcactattaagggttcattccttaatggttcatgtggtagtgttggttttaacatagattatgactgtgtctctttttgttacatgcaccatatggaattaccaactggagttcatgctggcacagacttagaaggtaacttttatggaccttttgttgacaggcaaacagcacaagcagctggtacggacacaactattacagttaatgttttagcttggttgtacgctgctgttataaatggagacaggtggtttctcaatcgatttaccacaactcttaatgactttaaccttgtggctatgaagtacaattatgaacctctaacacaagaccatgttgacatactaggacctctttctgctcaaactggaattgccgttttagatatgtgtgcttcattaaaagaattactgcaaaatggtatgaatggacgtaccatattgggtagtgctttattagaagatgaatttacaccttttgatgttgttagacaatgctcaggtgttactttccaaagtgcagtgaaaagaacaatcaagggtacacaccactggttgttactcacaattttgacttcacttttagttttagtccagagtactcaatggtctttgttcttttttttgtatgaaaatgcctttttaccttttgctatgggtattattgctatgtctgcttttgcaatgatgtttgtcaaacataagcatgcatttctctgtttgtttttgttaccttctcttgccactgtagcttattttaatatggtctatatgcctgctagttgggtgatgcgtattatgacatggttggatatggttgatactagtttgtctggttttaagctaaaagactgtgttatgtatgcatcagctgtagtgttactaatccttatgacagcaagaactgtgtatgatgatggtgctaggagagtgtggacacttatgaatgtcttgacactcgtttataaagtttattatggtaatgctttagatcaagccatttccatgtgggctcttataatctctgttacttctaactactcaggtgtagttacaactgtcatgtttttggccagaggtattgtttttatgtgtgttgagtattgccctattttcttcataactggtaatacacttcagtgtataatgctagtttattgtttcttaggctatttttgtacttgttactttggcctcttttgtttactcaaccgctactttagactgactcttggtgtttatgattacttagtttctacacaggagtttagatatatgaattcacagggactactcccacccaagaatagcatagatgccttcaaactcaacattaaattgttgggtgttggtggcaaaccttgtatcaaagtagccactgtacagtctaaaatgtcagatgtaaagtgcacatcagtagtcttactctcagttttgcaacaactcagagtagaatcatcatctaaattgtgggctcaatgtgtccagttacacaatgacattctcttagctaaagatactactgaagcctttgaaaaaatggtttcactactttctgttttgctttccatgcagggtgctgtagacataaacaagctttgtgaagaaatgctggacaacagggcaaccttacaagctatagcctcagagtttagttcccttccatcatatgcagcttttgctactgctcaagaagcttatgagcaggctgttgctaatggtgattctgaagttgttcttaaaaagttgaagaagtctttgaatgtggctaaatctgaatttgaccgtgatgcagccatgcaacgtaagttggaaaagatggctgatcaagctatgacccaaatgtataaacaggctagatctgaggacaagagggcaaaagttactagtgctatgcagacaatgcttttcactatgcttagaaagttggataatgatgcactcaacaacattatcaacaatgcaagagatggttgtgttcccttgaacataatacctcttacaacagcagccaaactaatggttgtcataccagactataacacatataaaaatacgtgtgatggtacaacatttacttatgcatcagcattgtgggaaatccaacaggttgtagatgcagatagtaaaattgttcaacttagtgaaattagtatggacaattcacctaatttagcatggcctcttattgtaacagctttaagggccaattctgctgtcaaattacagaataatgagcttagtcctgttgcactacgacagatgtcttgtgctgccggtactacacaaactgcttgcactgatgacaatgcgttagcttactacaacacaacaaagggaggtaggtttgtacttgcactgttatccgatttacaggatttgaaatgggctagattccctaagagtgatggaactggtactatctatacagaactggaaccaccttgtaggtttgttacagacacacctaaaggtcctaaagtgaagtatttatactttattaaaggattaaacaacctaaatagaggtatggtacttggtagtttagctgccacagtacgtctacaagctggtaatgcaacagaagtgcctgccaattcaactgtattatctttctgtgcttttgctgtagatgctgctaaagcttacaaagattatctagctagtgggggacaaccaatcactaattgtgttaagatgttgtgtacacacactggtactggtcaggcaataacagttacaccggaagccaatatggatcaagaatcctttggtggtgcatcgtgttgtctgtactgccgttgccacatagatcatccaaatcctaaaggattttgtgacttaaaaggtaagtatgtacaaatacctacaacttgtgctaatgaccctgtgggttttacacttaaaaacacagtctgtaccgtctgcggtatgtggaaaggttatggctgtagttgtgatcaactccgcgaacccatgcttcagtcagctgatgcacaatcgtttttaaacgggtttgcggtgtaagtgcagcccgtcttacaccgtgcggcacaggcactagtactgatgtcgtatacagggcttttgacatctacaatgataaagtagctggttttgctaaattcctaaaaactaattgttgtcgcttccaagaaaaggacgaagatgacaatttaattgattcttactttgtagttaagagacacactttctctaactaccaacatgaagaaacaatttataatttacttaaggattgtccagctgttgctaaacatgacttctttaagtttagaatagacggtgacatggtaccacatatatcacgtcaacgtcttactaaatacacaatggcagacctcgtctatgctttaaggcattttgatgaaggtaattgtgacacattaaaagaaatacttgtcacatacaattgttgtgatgatgattatttcaataaaaaggactggtatgattttgtagaaaacccagatatattacgcgtatacgccaacttaggtgaacgtgtacgccaagctttgttaaaaacagtacaattctgtgatgccatgcgaaatgctggtattgttggtgtactgacattagataatcaagatctcaatggtaactggtatgatttcggtgatttcatacaaaccacgccaggtagtggagttcctgttgtagattcttattattcattgttaatgcctatattaaccttgaccagggctttaactgcagagtcacatgttgacactgacttaacaaagccttacattaagtgggatttgttaaaatatgacttcacggaagagaggttaaaactctttgaccgttattttaaatattgggatcagacataccacccaaattgtgttaactgtttggatgacagatgcattctgcattgtgcaaactttaatgttttattctctacagtgttcccacttacaagttttggaccactagtgagaaaaatatttgttgatggtgttccatttgtagtttcaactggataccacttcagagagctaggtgttgtacataatcaggatgtaaatttacatagctctagacttagttttaaggaattacttgtgtatgctgctgaccctgctatgcacgctgcttctggtaatctattactagataaacgcactacgtgcttttcagtagctgcacttactaacaatgttgcttttcaaactgtcaaacccggtaattttaacaaagacttctatgactttgctgtgtctaagggtttctttaaggaaggaagttctgttgaattaaaacacttcttctttgctcaggatggtaatgctgctatcagcgattatgactactatcgttataatctaccaacaatgtgtgatatcagacaactactatttgtagttgaagttgttgataagtactttgattgttacgatggtggctgtattaatgctaaccaagtcatcgtcaacaacctagacaaatcagctggttttccatttaataaatggggtaaggctagactttattatgattcaatgagttatgaggatcaagatgcacttttcgcatatacaaaacgtaatgtcatccctactataactcaaatgaatcttaagtatgccattagtgcaaagaatagagctcgcaccgtagctggtgtctctatctgtagtactatgaccaatagacagtttcatcaaaaattattgaaatcaatagccgccactagaggagctactgtagtaattggaacaagcaaattctatggtggttggcacaacatgttaaaaactgtttatagtgatgtagaaaaccctcaccttatgggttgggattatcctaaatgtgatagagccatgcctaatatgcttagaattatggcctcacttgttcttgctcgcaaacatacaacgtgttgtagcttgtcacaccgtttctatagattagctaatgagtgtgctcaagtattgagtgaaatggtcatgtgtggcggttcactatatgttaaaccaggtggaacctcatcaggagatgccacaactgcttatgctaatagtgtttttaacatttgtcaagctgtcacggccaatgttaatgcacttttatctactgatggtaacaaaattgccgataagtatgtccgcaatttacaacacagactttatgagtgtctctatagaaatagagatgttgacacagactttgtgaatgagttttacgcatatttgcgtaaacatttctcaatgatgatactctctgacgatgctgttgtgtgtttcaatagcacttatgcatctcaaggtctagtggctagcataaagaactttaagtcagttctttattatcaaaacaatgtttttatgtctgaagcaaaatgttggactgagactgaccttactaaaggacctcatgaattttgctctcaacatacaatgctagttaaacagggtgatgattatgtgtaccttccttacccagatccatcaagaatcctaggggccggctgttttgtagatgatatcgtaaaaacagatggtacacttatgattgaacggttcgtgtctttagctatagatgcttacccacttactaaacatcctaatcaggagtatgctgatgtctttcatttgtacttacaatacataagaaagctacatgatgagttaacaggacacatgttagacatgtattctgttatgcttactaatgataacacttcaaggtattgggaacctgagttttatgaggctatgtacacaccgcatacagtcttacaggctgttggggcttgtgttctttgcaattcacagacttcattaagatgtggtgcttgcatacgtagaccattcttatgttgtaaatgctgttacgaccatgtcatatcaacatcacataaattagtcttgtctgttaatccgtatgtttgcaatgctccaggttgtgatgtcacagatgtgactcaactttacttaggaggtatgagctattattgtaaatcacataaaccacccattagttttccattgtgtgctaatggacaagtttttggtttatataaaaatacatgtgttggtagcgataatgttactgactttaatgcaattgcaacatgtgactggacaaatgctggtgattacattttagctaacacctgtactgaaagactcaagctttttgcagcagaaacgctcaaagctactgaggagacatttaaactgtcttatggtattgctactgtacgtgaagtgctgtctgacagagaattacatctttcatgggaagttggtaaacctagaccaccacttaaccgaaattatgtctttactggttatcgtgtaactaaaaacagtaaagtacaaataggagagtacacctttgaaaaaggtgactatggtgatgctgttgtttaccgaggtacaacaacttacaaattaaatgttggtgattattttgtgctgacatcacatacagtaatgccattaagtgcacctacactagtgccacaagagcactatgttagaattactggcttatacccaacactcaatatctcagatgagttttctagcaatgttgcaaattatcaaaaggttggtatgcaaaagtattctacactccagggaccacctggtactggtaagagtcattttgctattggcctagctctctactacccttctgctcgcatagtgtatacagcttgctctcatgccgctgttgatgcactatgtgagaaggcattaaaatatttgcctatagataaatgtagtagaattatacctgcacgtgctcgtgtagagtgttttgataaattcaaagtgaattcaacattagaacagtatgtcttttgtactgtaaatgcattgcctgagacgacagcagatatagttgtctttgatgaaatttcaatggccacaaattatgatttgagtgttgtcaatgccagattacgtgctaagcactatgtgtacattggcgaccctgctcaattacctgcaccacgcacattgctaactaagggcacactagaaccagaatatttcaattcagtgtgtagacttatgaaaactataggtccagacatgttcctcggaacttgtcggcgttgtcctgctgaaattgttgacactgtgagtgctttggtttatgataataagcttaaagcacataaagacaaatcagctcaatgctttaaaatgttttataagggtgttatcacgcatgatgtttcatctgcaattaacaggccacaaataggcgtggtaagagaattccttacacgtaaccctgcttggagaaaagctgtctttatttcaccttataattcacagaatgctgtagcctcaaagattttgggactaccaactcaaactgttgattcatcacagggctcagaatatgactatgtcatattcactcaaaccactgaaacagctcactcttgtaatgtaaacagatttaatgttgctattaccagagcaaaagtaggcatactttgcataatgtctgatagagacctttatgacaagttgcaatttacaagtcttgaaattccacgtaggaatgtggcaactttacaagctgaaaatgtaacaggactctttaaagattgtagtaaggtaatcactgggttacatcctacacaggcacctacacacctcagtgttgacactaaattcaaaactgaaggtttatgtgttgacatacctggcatacctaaggacatgacctatagaagactcatctctatgatgggttttaaaatgaattatcaagttaatggttaccctaacatgtttatcacccgcgaagaagctataagacatgtacgtgcatggattggcttcgatgtcgaggggtgtcatgctactagagaagctgttggtaccaatttacctttacagctaggtttttctacaggtgttaacctagttgctgtacctacaggttatgttgatacacctaataatacagatttttccagagttagtgctaaaccaccgcctggagatcaatttaaacacctcataccacttatgtacaaaggacttccttggaatgtagtgcgtataaagattgtacaaatgttaagtgacacacttaaaaatctctctgacagagtcgtatttgtcttatgggcacatggctttgagttgacatctatgaagtattttgtgaaaataggacctgagcgcacctgttgtctatgtgatagacgtgccacatgcttttccactgcttcagacacttatgcctgttggcatcattctattggatttgattacgtctataatccgtttatgattgatgttcaacaatggggttttacaggtaacctacaaagcaaccatgatctgtattgtcaagtccatggtaatgcacatgtagctagttgtgatgcaatcatgactaggtgtctagctgtccacgagtgctttgttaagcgtgttgactggactattgaatatcctataattggtgatgaactgaagattaatgcggcttgtagaaaggttcaacacatggttgttaaagctgcattattagcagacaaattcccagttcttcacgacattggtaaccctaaagctattaagtgtgtacctcaagctgatgtagaatggaagttctatgatgcacagccttgtagtgacaaagcttataaaatagaagaattattctattcttatgccacacattctgacaaattcacagatggtgtatgcctattttggaattgcaatgtcgatagatatcctgctaattccattgtttgtagatttgacactagagtgctatctaaccttaacttgcctggttgtgatggtggcagtttgtatgtaaataaacatgcattccacacaccagcttttgataaaagtgcttttgttaatttaaaacaattaccatttttctattactctgacagtccatgtgagtctcatggaaaacaagtagtgtcagatatagattatgtaccactaaagtctgctacgtgtataacacgttgcaatttaggtggtgctgtctgtagacatcatgctaatgagtacagattgtatctcgatgcttataacatgatgatctcagctggctttagcttgtgggtttacaaacaatttgatacttataacctctggaacacttttacaagacttcagagtttagaaaatgtggcttttaatgttgtaaataagggacactttgatggacaacagggtgaagtaccagtttctatcattaataacactgtttacacaaaagttgatggtgttgatgtagaattgtttgaaaataaaacaacattacctgttaatgtagcatttgagctttgggctaagcgcaacattaaaccagtaccagaggtgaaaatactcaataatttgggtgtggacattgctgctaatactgtgatctgggactacaaaagagatgctccagcacatatatctactattggtgtttgttctatgactgacatagccaagaaaccaactgaaacgatttgtgcaccactcactgtcttttttgatggtagagttgatggtcaagtagacttatttagaaatgcccgtaatggtgttcttattacagaaggtagtgttaaaggtttacaaccatctgtaggtcccaaacaagctagtcttaatggagtcacattaattggagaagccgtaaaaacacagttcaattattataagaaagttgatggtgttgtccaacaattacctgaaacttactttactcagagtagaaatttacaagaatttaaacccaggagtcaaatggaaattgatttcttagaattagctatggatgaattcattgaacggtataaattagaaggctatgccttcgaacatatcgtttatggagattttagtcatagtcagttaggtggtttacatctactgattggactagctaaacgttttaaggaatcaccttttgaattagaagattttattcctatggacagtacagttaaaaactatttcataacagatgcgcaaacaggttcatctaagtgtgtgtgttctgttattgatttattacttgatgattttgttgaaataataaaatcccaagatttatctgtagtttctaaggttgtcaaagtgactattgactatacagaaatttcatttatgctttggtgtaaagatggccatgtagaaacattttacccaaaattacaatctagtcaagcgtggcaaccgggtgttgctatgcctaatctttacaaaatgcaaagaatgctattagaaaagtgtgaccttcaaaattatggtgatagtgcaacattacctaaaggcataatgatgaatgtcgcaaaatatactcaactgtgtcaatatttaaacacattaacattagctgtaccctataatatgagagttatacattttggtgctggttctgataaaggagttgcaccaggtacagctgttttaagacagtggttgcctacgggtacgctgcttgtcgactcagatcttaatgactttgtctctgatgcagattcaactttgattggtgattgtgcaactgtacatacagctaataaatgggatctcattattagtgatatgtacgaccctaagactaaaaatgttacaaaagaaaatgactctaaagagggttttttcacttacatttgtgggtttatacaacaaaagctagctcttggaggttccgtggctataaagataacagaacattcttggaatgctgatctttataagctcatgggacacttcgcatggtggacagcctttgttactaatgtgaatgcgtcatcatctgaagcatttttaattggatgtaattatcttggcaaaccacgcgaacaaatagatggttatgtcatgcatgcaaattacatattttggaggaatacaaatccaattcagttgtcttcctattctttatttgacatgagtaaatttccccttaaattaaggggtactgctgttatgtctttaaaagaaggtcaaatcaatgatatgattttatctcttcttagtaaaggtagacttataattagagaaaacaacagagttgttatttctagtgatgttcttgttaacaactaaacgaacaatgtttgtttttcttgttttattgccactagtctctagtcagtgtgttaatcttacaaccagaactcaattaccccctgcatacactaattctttcacacgtggtgtttattaccctgacaaagttttcagatcctcagttttacattcaactcaggacttgttcttacctttcttttccaatgttacttggttccatgctatacatgtctctgggaccaatggtactaagaggtttgataaccctgtcctaccatttaatgatggtgtttattttgcttccactgagaagtctaacataataagaggctggatttttggtactactttagattcgaagacccagtccctacttattgttaataacgctactaatgttgttattaaagtctgtgaatttcaattttgtaatgatccatttttgggtgtttattaccacaaaaacaacaaaagttggatggaaagtgagttcagagtttattctagtgcgaataattgcacttttgaatatgtctctcagccttttcttatggaccttgaaggaaaacagggtaatttcaaaaatcttagggaatttgtgtttaagaatattgatggttattttaaaatatattctaagcacacgcctattaatttagtgcgtgatctccctcagggtttttcggctttagaaccattggtagatttgccaataggtattaacatcactaggtttcaaactttacttgctttacatagaagttatttgactcctggtgattcttcttcaggttggacagctggtgctgcagcttattatgtgggttatcttcaacctaggacttttctattaaaatataatgaaaatggaaccattacagatgctgtagactgtgcacttgaccctctctcagagacaaagtgtacgttgaaatccttcactgtagaaaaaggaatctatcaaacttctaactttagagtccaaccaacagaatctattgttagatttcctaatattacaaacttgtgcccttttggtgaagtttttaacgccaccagatttgcatctgtttatgcttggaacaggaagagaatcagcaactgtgttgctgattattctgtcctatataattccgcatcattttccacttttaagtgttatggagtgtctcctactaaattaaatgatctctgctttactaatgtctatgcagattcatttgtaattagaggtgatgaagtcagacaaatcgctccagggcaaactggaaagattgctgattataattataaattaccagatgattttacaggctgcgttatagcttggaattctaacaatcttgattctaaggttggtggtaattataattacctgtatagattgtttaggaagtctaatctcaaaccttttgagagagatatttcaactgaaatctatcaggccggtagcacaccttgtaatggtgttgaaggttttaattgttactttcctttacaatcatatggtttccaacccactaatggtgttggttaccaaccatacagagtagtagtactttcttttgaacttctacatgcaccagcaactgtttgtggacctaaaaagtctactaatttggttaaaaacaaatgtgtcaatttcaacttcaatggtttaacaggcacaggtgttcttactgagtctaacaaaaagtttctgcctttccaacaatttggcagagacattgctgacactactgatgctgtccgtgatccacagacacttgagattcttgacattacaccatgttcttttggtggtgtcagtgttataacaccaggaacaaatacttctaaccaggttgctgttctttatcagggtgttaactgcacagaagtccctgttgctattcatgcagatcaacttactcctacttggcgtgtttattctacaggttctaatgtttttcaaacacgtgcaggctgtttaataggggctgaacatgtcaacaactcatatgagtgtgacatacccattggtgcaggtatatgcgctagttatcagactcagactaattctcctcggcgggcacgtagtgtagctagtcaatccatcattgcctacactatgtcacttggtgcagaaaattcagttgcttactctaataactctattgccatacccacaaattttactattagtgttaccacagaaattctaccagtgtctatgaccaagacatcagtagattgtacaatgtacatttgtggtgattcaactgaatgcagcaatcttttgttgcaatatggcagtttttgtacacaattaaaccgtgctttaactggaatagctgttgaacaagacaaaaacacccaagaagtttttgcacaagtcaaacaaatttacaaaacaccaccaattaaagattttggtggttttaatttttcacaaatattaccagatccatcaaaaccaagcaagaggtcatttattgaagatctacttttcaacaaagtgacacttgcagatgctggcttcatcaaacaatatggtgattgccttggtgatattgctgctagagacctcatttgtgcacaaaagtttaacggccttactgttttgccacctttgctcacagatgaaatgattgctcaatacacttctgcactgttagcgggtacaatcacttctggttggacctttggtgcaggtgctgcattacaaataccatttgctatgcaaatggcttataggtttaatggtattggagttacacagaatgttctctatgagaaccaaaaattgattgccaaccaatttaatagtgctattggcaaaattcaagactcactttcttccacagcaagtgcacttggaaaacttcaagatgtggtcaaccaaaatgcacaagctttaaacacgcttgttaaacaacttagctccaattttggtgcaatttcaagtgttttaaatgatatcctttcacgtcttgacaaagttgaggctgaagtgcaaattgataggttgatcacaggcagacttcaaagtttgcagacatatgtgactcaacaattaattagagctgcagaaatcagagcttctgctaatcttgctgctactaaaatgtcagagtgtgtacttggacaatcaaaaagagttgatttttgtggaaagggctatcatcttatgtccttccctcagtcagcacctcatggtgtagtcttcttgcatgtgacttatgtccctgcacaagaaaagaacttcacaactgctcctgccatttgtcatgatggaaaagcacactttcctcgtgaaggtgtctttgtttcaaatggcacacactggtttgtaacacaaaggaatttttatgaaccacaaatcattactacagacaacacatttgtgtctggtaactgtgatgttgtaataggaattgtcaacaacacagtttatgatcctttgcaacctgaattagactcattcaaggaggagttagataaatattttaagaatcatacatcaccagatgttgatttaggtgacatctctggcattaatgcttcagttgtaaacattcaaaaagaaattgaccgcctcaatgaggttgccaagaatttaaatgaatctctcatcgatctccaagaacttggaaagtatgagcagtatataaaatggccatggtacatttggctaggttttatagctggcttgattgccatagtaatggtgacaattatgctttgctgtatgaccagttgctgtagttgtctcaagggctgttgttcttgtggatcctgctgcaaatttgatgaagacgactctgagccagtgctcaaaggagtcaaattacattacacataaacgaacttatggatttgtttatgagaatcttcacaattggaactgtaactttgaagcaaggtgaaatcaaggatgctactccttcagattttgttcgcgctactgcaacgataccgatacaagcctcactccctttcggatggcttattgttggcgttgcacttcttgctgtttttcagagcgcttccaaaatcataaccctcaaaaagagatggcaactagcactctccaagggtgttcactttgtttgcaacttgctgttgttgtttgtaacagtttactcacaccttttgctcgttgctgctggccttgaagccccttttctctatctttatgctttagtctacttcttgcagagtataaactttgtaagaataataatgaggctttggctttgctggaaatgccgttccaaaaacccattactttatgatgccaactattttctttgctggcatactaattgttacgactattgtataccttacaatagtgtaacttcttcaattgtcattacttcaggtgatggcacaacaagtcctatttctgaacatgactaccagattggtggttatactgaaaaatgggaatctggagtaaaagactgtgttgtattacacagttacttcacttcagactattaccagctgtactcaactcaattgagtacagacactggtgttgaacatgttaccttcttcatctacaataaaattgttgatgagcctgaagaacatgtccaaattcacacaatcgacggttcatccggagttgttaatccagtaatggaaccaatttatgatgaaccgacgacgactactagcgtgcctttgtaagcacaagctgatgagtacgaacttatgtactcattcgtttcggaagagacaggtacgttaatagttaatagcgtacttctttttcttgctttcgtggtattcttgctagttacactagccatccttactgcgcttcgattgtgtgcgtactgctgcaatattgttaacgtgagtcttgtaaaaccttctttttacgtttactctcgtgttaaaaatctgaattcttctagagttcctgatcttccggtctaaacgaactaaatattatattagtttttctgtttggaactttaattttagccatggcagattccaacggtactattaccgttgaagagcttaaaaagctccttgaacaatggaacctagtaataggtttcctattccttacatggatttgtcttctacaatttgcctatgccaacaggaataggtttttgtatataattaagttaattttcctctggctgttatggccagtaactttagcttgttttgtgcttgctgctgtttacagaataaattggatcaccggtggaattgctatcgcaatggcttgtcttgtaggcttgatgtggctcagctacttcattgcttctttcagactgtttgcgcgtacgcgttccatgtggtcattcaatccagaaactaacattcttctcaacgtgccactccatggcactattctgaccagaccgcttctagaaagtgaactcgtaatcggagctgtgatccttcgtggacatcttcgtattgctggacaccatctaggacgctgtgacatcaaggacctgcctaaagaaatcactgttgctacatcacgaacgctttcttattacaaattgggagcttcgcagcgtgtagcaggtgactcaggttttgctgcatacagtcgctacaggattggcaactataaattaaacacagaccattccagtagcagtgacaatattgctttgcttgtacagtaagtgacaacagatgtttcatctcgttgactttcaggttactatagcagagatattactaattattatgaggacttttaaagtttccatttggaatcttgattacatcataaacctcataattaaaaatttatctaagtcactaactgagaataaatattctcaattagatgaagagcaaccaatggagattgattaaacgaacatgaaaattattcttttcttggcactgataacactcgctacttgtgagctttatcactaccaagagtgtgttagaggtacaacagtacttttaaaagaaccttgctcttctggaacatacgagggcaattcaccatttcatcctctagctgataacaaatttgcactgacttgctttagcactcaatttgcttttgcttgtcctgacggcgtaaaacacgtctatcagttacgtgccagatcagtttcacctaaactgttcatcagacaagaggaagttcaagaactttactctccaatttttcttattgttgcggcaatagtgtttataacactttgcttcacactcaaaagaaagacagaatgattgaactttcattaattgacttctatttgtgctttttagcctttctgctattccttgttttaattatgcttattatcttttggttctcacttgaactgcaagatcataatgaaacttgtcacgcctaaacgaacatgaaatttcttgttttcttaggaatcatcacaactgtagctgcatttcaccaagaatgtagtttacagtcatgtactcaacatcaaccatatgtagttgatgacccgtgtcctattcacttctattctaaatggtatattagagtaggagctagaaaatcagcacctttaattgaattgtgcgtggatgaggctggttctaaatcacccattcagtacatcgatatcggtaattatacagtttcctgtttaccttttacaattaattgccaggaacctaaattgggtagtcttgtagtgcgttgttcgttctatgaagactttttagagtatcatgacgttcgtgttgttttagatttcatctaaacgaacaaactaaaatgtctgataatggaccccaaaatcagcgaaatgcaccccgcattacgtttggtggaccctcagattcaactggcagtaaccagaatggagaacgcagtggggcgcgatcaaaacaacgtcggccccaaggtttacccaataatactgcgtcttggttcaccgctctcactcaacatggcaaggaagaccttaaattccctcgaggacaaggcgttccaattaacaccaatagcagtccagatgaccaaattggctactaccgaagagctaccagacgaattcgtggtggtgacggtaaaatgaaagatctcagtccaagatggtatttctactacctaggaactgggccagaagctggacttccctatggtgctaacaaagacggcatcatatgggttgcaactgagggagccttgaatacaccaaaagatcacattggcacccgcaatcctgctaacaatgctgcaatcgtgctacaacttcctcaaggaacaacattgccaaaaggcttctacgcagaagggagcagaggcggcagtcaagcctcttctcgttcctcatcacgtagtcgcaacagttcaagaaattcaactccaggcagcagtaggggaacttctcctgctagaatggctggcaatggcggtgatgctgctcttgctttgctgctgcttgacagattgaaccagcttgagagcaaaatgtctggtaaaggccaacaacaacaaggccaaactgtcactaagaaatctgctgctgaggcttctaagaagcctcggcaaaaacgtactgccactaaagcatacaatgtaacacaagctttcggcagacgtggtccagaacaaacccaaggaaattttggggaccaggaactaatcagacaaggaactgattacaaacattggccgcaaattgcacaatttgcccccagcgcttcagcgttcttcggaatgtcgcgcattggcatggaagtcacaccttcgggaacgtggttgacctacacaggtgccatcaaattggatgacaaagatccaaatttcaaagatcaagtcattttgctgaataagcatattgacgcatacaaaacattcccaccaacagagcctaaaaaggacaaaaagaagaaggctgatgaaactcaagccttaccgcagagacagaagaaacagcaaactgtgactcttcttcctgctgcagatttggatgatttctccaaacaattgcaacaatccatgagcagtgctgactcaactcaggcctaaactcatgcagaccacacaaggcagatgggctatataaacgttttcgcttttccgtttacgatatatagtctactcttgtgcagaatgaattctcgtaactacatagcacaagtagatgtagttaactttaatctcacatagcaatctttaatcagtgtgtaacattagggaggacttgaaagagccaccacattttcaccgaggccacgcggagtacgatcgagtgtacagtgaacaatgctagggagagctgcctatatggaagagccctaatgtgtaaaattaattttagtagtgctatccccatgtg

SEQ ID NO: 62 - DNA, 29810 bp, synthetic construct
  misc_feature 1..29810: note = Reconstituted virus 25
  source 1..29810: mol_type = other DNA
accaactttcgatctcttgtagatctgttctctaaacgaactttaaaatctgtgtggctgtcactcggctgcatgcttagtgcactcacgcagtataattaataactaattactgtcgttgacaggacacgagtaactcgtctatcttctgcaggctgcttacggtttcgtccgtgttgcagccgatcatcagcacatctaggttttgtccgggtgtgaccgaaaggtaagatggagagccttgtccctggtttcaacgagaaaacacacgtccaactcagtttgcctgttttacaggttcgcgacgtgctcgtacgtggctttggagactccgtggaggaggtcttatcagaggcacgtcaacatcttaaagatggcacttgtggcttagtagaagttgaaaaaggcgttttgcctcaacttgaacagccctatgtgttcatcaaacgttcggatgctcgaactgcacctcatggtcatgttatggttgagctggtagcagaactcgaaggcattcagtacggtcgtagtggtgagacacttggtgtccttgtccctcatgtgggcgaaataccagtggcttaccgcaaggttcttcttcgtaagaacggtaataaaggagctggtggccatagttacggcgccgatctaaagtcatttgacttaggcgacgagcttggcactgatccttatgaagattttcaagaaaactggaacactaaacatagcagtggtgttacccgtgaactcatgcgtgagcttaacggaggggcatacactcgctatgtcgataacaacttctgtggccctgatggctaccctcttgagtgcattaaagaccttctagcacgtgctggtaaagcttcatgcactttgtccgaacaactggactttattgacactaagaggggtgtatactgctgccgtgaacatgagcatgaaattgcttggtacacggaacgttctgaaaagagctatgaattgcagacaccttttgaaattaaattggcaaagaaatttgacaccttcaatggggaatgtccaaattttgtatttcccttaaattccataatcaagactattcaaccaagggttgaaaagaaaaagcttgatggctttatgggtagaattcgatctgtctatccagttgcgtcaccaaatgaatgcaaccaaatgtgcctttcaactctcatgaagtgtgatcattgtggtgaaacttcatggcagacgggcgattttgttaaagccacttgcgaattttgtggcactgagaatttgactaaagaaggtgccactacttgtggttacttaccccaaaatgctgttgttaaaatttattgtccagcatgtcacaattcagaagtaggacctgagcatagtcttgccgaataccataatgaatctggcttgaaaaccattcttcgtaagggtggtcgcactattgcctttggaggctgtgtgttctcttatgttggttgccataacaagtgtgcctattgggttccacgtgctagcgctaacataggttgtaaccatacaggtgttgttggagaaggttccgaaggtcttaatgacaaccttcttgaaatactccaaaaagagaaagtcaacatcaatattgttggtgactttaaacttaatgaagagatcgccattattttggcatctttttctgcttccacaagtgcttttgtggaaactgtgaaaggtttggattataaagcattcaaacaaattgttgaatcctgtggtaattttaaagttacaaaaggaaaagctaaaaaaggtgcctggaatattggtgaacagaaatcaatactgagtcctctttatgcatttgcatcagaggctgctcgtgttgtacgatcaattttctcccgcactcttgaaactgctcaaaattctgtgcgtgttttacagaaggccgctataacaatactagatggaatttcacagtattcactgagactcattgatgctatgatgttcacatctgatttggctactaacaatctagttgtaatggcctacattacaggtggtgttgttcagttgacttcgcagtggctaactaacatctttggcactgtttatgaaaaactcaaacccgtccttgattggcttgaagagaagtttaaggaaggtgtagagtttcttagagacggttgggaaattgttaaatttatctcaacctgtgcttgtgaaattgtcggtggacaaattgtcacctgtgcaaaggaaattaaggagagtgttcagacattctttaagcttgtaaataaatttttggctttgtgtgctgactctatcattattggtggagctaaacttaaagccttgaatttaggtgaaacatttgtcacgcactcaaagggattgtacagaaagtgtgttaaatccagagaagaaactggcctactcatgcctctaaaagccccaaaagaaattatcttcttagagggagaaacacttcccacagaagtgttaacagaggaagttgtcttgaaaactggtgatttacaaccattagaacaacctactagtgaagctgttgaagctccattggttggtacaccagtttgtattaacgggcttatgttgctcgaaatcaaagacacagaaaagtactgtgcccttgcacctaatatgatggtaacaaacaataccttcacactcaaaggcggtgcaccaacaaaggttacttttggtgatgacactgtgatagaagtgcaaggttacaagagtgtgaatatcacttttgaacttgatgaaaggattgataaagtacttaatgagaagtgctctgcctatacagttgaactcggtacagaagtaaatgagttcgcctgtgttgtggcagatgctgtcataaaaactttgcaaccagtatctgaattacttacaccactgggcattgatttagatgagtggagtatggctacatactacttatttgatgagtctggtgagtttaaattggcttcacatatgtattgttctttttaccctccagatgaggatgaagaagaaggtgattgtgaagaagaagagtttgagccatcaactcaatatgagtatggtactgaagatgattaccaaggtaaacctttggaatttggtgccacttctgctgctcttcaacctgaagaagagcaagaagaagattggttagatgatgatagtcaacaaactgttggtcaacaagacggcagtgaggacaatcagacaactactattcaaacaattgttgaggttcaacctcaattagagatggaacttacaccagttgttcagactattgaagtgaatagttttagtggttatttaaaacttactgacaatgtatacattaaaaatgcagacattgtggaagaagctaaaaaggtaaaaccaacagtggttgttaatgcagccaatgtttaccttaaacatggaggaggtgttgcaggagccttaaataaggctactaacaatgccatgcaagttgaatctgatgattacatagctactaatggaccacttaaagtgggtggtagttgtgttttaagcggacacaatcttgctaaacactgtcttcatgttgtcggcccaaatgttaacaaaggtgaagacattcaacttcttaagagtgcttatgaaaattttaatcagcacgaagttctacttgcaccattattatcagctggtatttttggtgctgaccctatacattctttaagagtttgtgtagatactgttcgcacaaatgtctacttagctgtctttgataaaaatctctatgacaaacttgtttcaagctttttggaaatgaagagtgaaaagcaagttgaacaaaagatcgctgagattcctaaagaggaagttaagccatttataactgaaagtaaaccttcagttgaacagagaaaacaagatgataagaaaatcaaagcttgtgttgaagaagttacaacaactctggaagaaactaagttcctcacagaaaacttgttactttatattgacattaatggcaatcttcatccagattctgccactcttgttagtgacattgacatcactttcttaaagaaagatgctccatatatagtgggtgatgttgttcaagagggtgttttaactgctgtggttatacctactaaaaaggctggtggcactactgaaatgctagcgaaagctttgagaaaagtgccaacagacaattatataaccacttacccgggtcagggtttaaatggttacactgtagaggaggcaaagacagtgcttaaaaagtgtaaaagtgccttttacattctaccatctattatctctaatgagaagcaagaaattcttggaactgtttcttggaatttgcgagaaatgcttgcacatgcagaagaaacacgcaaattaatgcctgtctgtgtggaaactaaagccatagtttcaactatacagcgtaaatataagggtattaaaatacaagagggtgtggttgattatggtgctagattttacttttacaccagtaaaacaactgtagcgtcacttatcaacacacttaacgatctaaatgaaactcttgttacaatgccacttggctatgtaacacatggcttaaatttggaagaagctgctcggtatatgagatctctcaaagtgccagctacagtttctgtttcttcacctgatgctgttacagcgtataatggttatcttacttcttcttctaaaacacctgaagaacattttattgaaaccatctcacttgctggttcctataaagattggtcctattctggacaatctacacaactaggtatagaatttcttaagagaggtgataaaagtgtatattacactagtaatcctaccacattccacctagatggtgaagttatcacctttgacaatcttaagacacttctttctttgagagaagtgaggactattaaggtgtttacaacagtagacaacattaacctccacacgcaagttgtggacatgtcaatgacatatggacaacagtttggtccaacttatttggatggagctgatgttactaaaataaaacctcataattcacatgaaggtaaaacattttatgttttacctaatgatgacactctacgtgttgaggcttttgagtactaccacacaactgatcctagttttctgggtaggtacatgtcagcattaaatcacactaaaaagtggaaatacccacaagttaatggtttaacttctattaaatgggcagataacaactgttatcttgccactgcattgttaacactccaacaaatagagttgaagtttaatccacctgctctacaagatgcttattacagagcaagggctggtgaagctgctaacttttgtgcacttatcttagcctactgtaataagacagtaggtgagttaggtgatgttagagaaacaatgagttacttgtttcaacatgccaatttagattcttgcaaaagagtcttgaacgtggtgtgtaaaacttgtggacaacagcagacaacccttaagggtgtagaagctgttatgtacatgggcacactttcttatgaacaatttaagaaaggtgttcagataccttgtacgtgtggtaaacaagctacaaaatatctagtacaacaggagtcaccttttgttatgatgtcagcaccacctgctcagtatgaacttaagcatggtacatttacttgtgctagtgagtacactggtaattaccagtgtggtcactataaacatataacttctaaagaaactttgtattgcatagacggtgctttacttacaaagtcctcagaatacaaaggtcctattacggatgttttctacaaagaaaacagttacacaacaaccataaaaccagttacttataaattggatggtgttgtttgtacagaaattgaccctaagttggacaattattataagaaagacaattcttatttcacagagcaaccaattgatcttgtaccaaaccaaccatatccaaacgcaagcttcgataattttaagtttgtatgtgataatatcaaatttgctgatgatttaaaccagttaactggttataagaaacctgcttcaagagagcttaaagttacatttttccctgacttaaatggtgatgtggtggctattgattataaacactacacaccctcttttaagaaaggagctaaattgttacataaacctattgtttggcatgttaacaatgcaactaataaagccacgtataaaccaaatacctggtgtatacgttgtctttggagcacaaaaccagttgaaacatcaaattcgtttgatgtactgaagtcagaggacgcgcagggaatggataatcttgcctgcgaagatctaaaaccagtctctgaagaagtagtggaaaatcctaccatacagaaagacgttcttgagtgtaatgtgaaaactaccgaagttgtaggagacattatacttaaaccagcaaataatagtttaaaaattacagaagaggttggccacacagatctaatggctgcttatgtagacaattctagtcttactattaagaaacctaatgaattatctagagtattaggtttgaaaacccttgctactcatggtttagctgctgttaatagtgtcccttgggatactatagctaattatgctaagccttttcttaacaaagttgttagtacaactactaacatagttacacggtgtttaaaccgtgtttgtactaattatatgccttatttctttactttattgctacaattgtgtacttttactagaagtacaaattctagaattaaagcatctatgccgactactatagcaaagaatactgttaagagtgtcggtaaattttgtctagaggcttcatttaattatttgaagtcacctaatttttctaaactgataaatattataatttggtttttactattaagtgtttgcctaggttctttaatctactcaaccgctgctttaggtgttttaatgtctaatttaggcatgccttcttactgtactggttacagagaaggctatttgaactctactaatgtcactattgcaacctactgtactggttctataccttgtagtgtttgtcttagtggtttagattctttagacacctatccttctttagaaactatacaaattaccatttcatcttttaaatgggatttaactgcttttggcttagttgcagagtggtttttggcatatattcttttcactaggtttttctatgtacttggattggctgcaatcatgcaattgtttttcagctattttgcagtacattttattagtaattcttggcttatgtggttaataattaatcttgtacaaatggccccgatttcagctatggttagaatgtacatcttctttgcatcattttattatgtatggaaaagttatgtgcatgttgtagacggttgtaattcatcaacttgtatgatgtgttacaaacgtaatagagcaacaagagtcgaatgtacaactattgttaatggtgttagaaggtccttttatgtctatgctaatggaggtaaaggcttttgcaaactacacaattggaattgtgttaattgtgatacattctgtgctggtagtacatttattagtgatgaagttgcgagagacttgtcactacagtttaaaagaccaataaatcctactgaccagtcttcttacatcgttgatagtgttacagtgaagaatggttccatccatctttactttgataaagctggtcaaaagacttatgaaagacattctctctctcattttgttaacttagacaacctgagagctaataacactaaaggttcattgcctattaatgttatagtttttgatggtaaatcaaaatgtgaagaatcatctgcaaaatcagcgtctgtttactacagtcagcttatgtgtcaacctatactgttactagatcaggcattagtgtctgatgttggtgatagtgcggaagttgcagttaaaatgtttgatgcttacgttaatacgttttcatcaacttttaacgtaccaatggaaaaactcaaaacactagttgcaactgcagaagctgaacttgcaaagaatgtgtccttagacaatgtcttatctacttttatttcagcagctcggcaagggtttgttgattcagatgtagaaactaaagatgttgttgaatgtcttaaattgtcacatcaatctgacatagaagttactggcgatagttgtaataactatatgctcacctataacaaagttgaaaacatgacaccccgtgaccttggtgcttgtattgactgtagtgcgcgtcatattaatgcgcaggtagcaaaaagtcacaacattgctttgatatggaacgttaaagatttcatgtcattgtctgaacaactacgaaaacaaatacgtagtgctgctaaaaagaataacttaccttttaagttgacatgtgcaactactagacaagttgttaatgttgtaacaacaaagatagcacttaagggtggtaaaattgttaataattggttgaagcagttaattaaagttacacttgtgttcctttttgttgctgctattttctatttaataacacctgttcatgtcatgtctaaacatactgacttttcaagtgaaatcataggatacaaggctattgatggtggtgtcactcgtgacatagcatctacagatacttgttttgctaacaaacatgctgattttgacacatggtttagccagcgtggtggtagttatactaatgacaaagcttgcccattgattgctgcagtcataacaagagaagtgggttttgtcgtgcctggtttgcctggcacgatattacgcacaactaatggtgactttttgcatttcttacctagagtttttagtgcagttggtaacatctgttacacaccatcaaaacttatagagtacactgactttgcaacatcagcttgtgttttggctgctgaatgtacaatttttaaagatgcttctggtaagccagtaccatattgttatgataccaatgtactagaaggttctgttgcttatgaaagtttacgccctgacacacgttatgtgctcatggatggctctattattcaatttcctaacacctaccttgaaggttctgttagagtggtaacaacttttgattctgagtactgtaggcacggcacttgtgaaagatcagaagctggtgtttgtgtatctactagtggtagatgggtacttaacaatgattattacagatctttaccaggagttttctgtggtgtagatgctgtaaatttacttactaatatgtttacaccactaattcaacctattggtgctttggacatatcagcatctatagtagctggtggtattgtagctatcgtagtaacatgccttgcctactattttatgaggtttagaagagcttttggtgaatacagtcatgtagttgcctttaatactttactattccttatgtcattcactgtactctgtttaacaccagtttactcattcttacctggtgtttattctgttatttacttgtacttgacattttatcttactaatgatgtttcttttttagcacatattcagtggatggttatgttcacacctttagtacctttctggataacaattgcttatatcatttgtatttccacaaagcatttctattggttctttagtaattacctaaagagacgtgtagtctttaatggtgtttcctttagtacttttgaagaagctgcgctgtgcacctttttgttaaataaagaaatgtatctaaagttgcgtagtgatgtgctattacctcttacgcaatataatagatacttagctctttataataagtacaagtattttagtggagcaatggatacaactagctacagagaagctgcttgttgtcatctcgcaaaggctctcaatgacttcagtaactcaggttctgatgttctttaccaaccaccacaaacctctatcacctcagctgttttgcagagtggttttagaaaaatggcattcccatctggtaaagttgagggttgtatggtacaagtaacttgtggtacaactacacttaacggtctttggcttgatgacgtagtttactgtccaagacatgtgatctgcacctctgaagacatgcttaaccctaattatgaagatttactcattcgtaagtctaatcataatttcttggtacaggctggtaatgttcaactcagggttattggacattctatgcaaaattgtgtacttaagcttaaggttgatacagccaatcctaagacacctaagtataagtttgttcgcattcaaccaggacagactttttcagtgttagcttgttacaatggttcaccatctggtgtttaccaatgtgctatgaggcccaatttcactattaagggttcattccttaatggttcatgtggtagtgttggttttaacatagattatgactgtgtctctttttgttacatgcaccatatggaattaccaactggagttcatgctggcacagacttagaaggtaacttttatggaccttttgttgacaggcaaacagcacaagcagctggtacggacacaactattacagttaatgttttagcttggttgtacgctgctgttataaatggagacaggtggtttctcaatcgatttaccacaactcttaatgactttaaccttgtggctatgaagtacaattatgaacctctaacacaagaccatgttgacatactaggacctctttctgctcaaactggaattgccgttttagatatgtgtgcttcattaaaagaattactgcaaaatggtatgaatggacgtaccatattgggtagtgctttattagaagatgaatttacaccttttgatgttgttagacaatgctcaggtgttactttccaaagtgcagtgaaaagaacaatcaagggtacacaccactggttgttactcacaattttgacttcacttttagttttagtccagagtactcaatggtctttgttcttttttttgtatgaaaatgcctttttaccttttgctatgggtattattgctatgtctgcttttgcaatgatgtttgtcaaacataagcatgcatttctctgtttgtttttgttaccttctcttgccactgtagcttattttaatatggtctatatgcctgctagttgggtgatgcgtattatgacatggttggatatggttgatactagtttgtctggttttaagctaaaagactgtgttatgtatgcatcagctgtagtgttactaatccttatgacagcaagaactgtgtatgatgatggtgctaggagagtgtggacacttatgaatgtcttgacactcgtttataaagtttattatggtaatgctttagatcaagccatttccatgtgggctcttataatctctgttacttctaactactcaggtgtagttacaactgtcatgtttttggccagaggtattgtttttatgtgtgttgagtattgccctattttcttcataactggtaatacacttcagtgtataatgctagtttattgtttcttaggctatttttgtacttgttactttggcctcttttgtttactcaaccgctactttagactgactcttggtgtttatgattacttagtttctacacaggagtttagatatatgaattcacagggactactcccacccaagaatagcatagatgccttcaaactcaacattaaattgttgggtgttggtggcaaaccttgtatcaaagtagccactgtacagtctaaaatgtcagatgtaaagtgcacatcagtagtcttactctcagttttgcaacaactcagagtagaatcatcatctaaattgtgggctcaatgtgtccagttacacaatgacattctcttagctaaagatactactgaagcctttgaaaaaatggtttcactactttctgttttgctttccatgcagggtgctgtagacataaacaagctttgtgaagaaatgctggacaacagggcaaccttacaagctatagcctcagagtttagttcccttccatcatatgcagcttttgctactgctcaagaagcttatgagcaggctgttgctaatggtgattctgaagttgttcttaaaaagttgaagaagtctttgaatgtggctaaatctgaatttgaccgtgatgcagccatgcaacgtaagttggaaaagatggctgatcaagctatgacccaaatgtataaacaggctagatctgaggacaagagggcaaaagttactagtgctatgcagacaatgcttttcactatgcttagaaagttggataatgatgcactcaacaacattatcaacaatgcaagagatggttgtgttcccttgaacataatacctcttacaacagcagccaaactaatggttgtcataccagactataacacatataaaaatacgtgtgatggtacaacatttacttatgcatcagcattgtgggaaatccaacaggttgtagatgcagatagtaaaattgttcaacttagtgaaattagtatggacaattcacctaatttagcatggcctcttattgtaacagctttaagggccaattctgctgtcaaattacagaataatgagcttagtcctgttgcactacgacagatgtcttgtgctgccggtactacacaaactgcttgcactgatgacaatgcgttagcttactacaacacaacaaagggaggtaggtttgtacttgcactgttatccgatttacaggatttgaaatgggctagattccctaagagtgatggaactggtactatctatacagaactggaaccaccttgtaggtttgttacagacacacctaaaggtcctaaagtgaagtatttatactttattaaaggattaaacaacctaaatagaggtatggtacttggtagtttagctgccacagtacgtctacaagctggtaatgcaacagaagtgcctgccaattcaactgtattatctttctgtgcttttgctgtagatgctgctaaagcttacaaagattatctagctagtgggggacaaccaatcactaattgtgttaagatgttgtgtacacacactggtactggtcaggcaataacagttacaccggaagccaatatggatcaagaatcctttggtggtgcatcgtgttgtctgtactgccgttgccacatagatcatccaaatcctaaaggattttgtgacttaaaaggtaagtatgtacaaatacctacaacttgtgctaatgaccctgtgggttttacacttaaaaacacagtctgtaccgtctgcggtatgtggaaaggttatggctgtagttgtgatcaactccgcgaacccatgcttcagtcagctgatgcacaatcgtttttaaacgggtttgcggtgtaagtgcagcccgtcttacaccgtgcggcacaggcactagtactgatgtcgtatacagggcttttgacatctacaatgataaagtagctggttttgctaaattcctaaaaactaattgttgtcgcttccaagaaaaggacgaagatgacaatttaattgattcttactttgtagttaagagacacactttctctaactaccaacatgaagaaacaatttataatttacttaaggattgtccagctgttgctaaacatgacttctttaagtttagaatagacggtgacatggtaccacatatatcacgtcaacgtcttactaaatacacaatggcagacctcgtctatgctttaaggcattttgatgaaggtaattgtgacacattaaaagaaatacttgtcacatacaattgttgtgatgatgattatttcaataaaaaggactggtatgattttgtagaaaacccagatatattacgcgtatacgccaacttaggtgaacgtgtacgccaagctttgttaaaaacagtacaattctgtgatgccatgcgaaatgctggtattgttggtgtactgacattagataatcaagatctcaatggtaactggtatgatttcggtgatttcatacaaaccacgccaggtagtggagttcctgttgtagattcttattattcattgttaatgcctatattaaccttgaccagggctttaactgcagagtcacatgttgacactgacttaacaaagccttacattaagtgggatttgttaaaatatgacttcacggaagagaggttaaaactctttgaccgttattttaaatattgggatcagacataccacccaaattgtgttaactgtttggatgacagatgcattctgcattgtgcaaactttaatgttttattctctacagtgttcccacttacaagttttggaccactagtgagaaaaatatttgttgatggtgttccatttgtagtttcaactggataccacttcagagagctaggtgttgtacataatcaggatgtaaatttacatagctctagacttagttttaaggaattacttgtgtatgctgctgaccctgctatgcacgctgcttctggtaatctattactagataaacgcactacgtgcttttcagtagctgcacttactaacaatgttgcttttcaaactgtcaaacccggtaattttaacaaagacttctatgactttgctgtgtctaagggtttctttaaggaaggaagttctgttgaattaaaacacttcttctttgctcaggatggtaatgctgctatcagcgattatgactactatcgttataatctaccaacaatgtgtgatatcagacaactactatttgtagttgaagttgttgataagtactttgattgttacgatggtggctgtattaatgctaaccaagtcatcgtcaacaacctagacaaatcagctggttttccatttaataaatggggtaaggctagactttattatgattcaatgagttatgaggatcaagatgcacttttcgcatatacaaaacgtaatgtcatccctactataactcaaatgaatcttaagtatgccattagtgcaaagaatagagctcgcaccgtagctggtgtctctatctgtagtactatgaccaatagacagtttcatcaaaaattattgaaatcaatagccgccactagaggagctactgtagtaattggaacaagcaaattctatggtggttggcacaacatgttaaaaactgtttatagtgatgtagaaaaccctcaccttatgggttgggattatcctaaatgtgatagagccatgcctaatatgcttagaattatggcctcacttgttcttgctcgcaaacatacaacgtgttgtagcttgtcacaccgtttctatagattagctaatgagtgtgctcaagtattgagtgaaatggtcatgtgtggcggttcactatatgttaaaccaggtggaacctcatcaggagatgccacaactgcttatgctaatagtgtttttaacatttgtcaagctgtcacggccaatgttaatgcacttttatctactgatggtaacaaaattgccgataagtatgtccgcaatttacaacacagactttatgagtgtctctatagaaatagagatgttgacacagactttgtgaatgagttttacgcatatttgcgtaaacatttctcaatgatgatactctctgacgatgctgttgtgtgtttcaatagcacttatgcatctcaaggtctagtggctagcataaagaactttaagtcagttctttattatcaaaacaatgtttttatgtctgaagcaaaatgttggactgagactgaccttactaaaggacctcatgaattttgctctcaacatacaatgctagttaaacagggtgatgattatgtgtaccttccttacccagatccatcaagaatcctaggggccggctgttttgtagatgatatcgtaaaaacagatggtacacttatgattgaacggttcgtgtctttagctatagatgcttacccacttactaaacatcctaatcaggagtatgctgatgtctttcatttgtacttacaatacataagaaagctacatgatgagttaacaggacacatgttagacatgtattctgttatgcttactaatgataacacttcaaggtattgggaacctgagttttatgaggctatgtacacaccgcatacagtcttacaggctgttggggcttgtgttctttgcaattcacagacttcattaagatgtggtgcttgcatacgtagaccattcttatgttgtaaatgctgttacgaccatgtcatatcaacatcacataaattagtcttgtctgttaatccgtatgtttgcaatgctccaggttgtgatgtcacagatgtgactcaactttacttaggaggtatgagctattattgtaaatcacataaaccacccattagttttccattgtgtgctaatggacaagtttttggtttatataaaaatacatgtgttggtagcgataatgttactgactttaatgcaattgcaacatgtgactggacaaatgctggtgattacattttagctaacacctgtactgaaagactcaagctttttgcagcagaaacgctcaaagctactgaggagacatttaaactgtcttatggtattgctactgtacgtgaagtgctgtctgacagagaattacatctttcatgggaagttggtaaacctagaccaccacttaaccgaaattatgtctttactggttatcgtgtaactaaaaacagtaaagtacaaataggagagtacacctttgaaaaaggtgactatggtgatgctgttgtttaccgaggtacaacaacttacaaattaaatgttggtgattattttgtgctgacatcacatacagtaatgccattaagtgcacctacactagtgccacaagagcactatgttagaattactggcttatacccaacactcaatatctcagatgagttttctagcaatgttgcaaattatcaaaaggttggtatgcaaaagtattctacactccagggaccacctggtactggtaagagtcattttgctattggcctagctctctactacccttctgctcgcatagtgtatacagcttgctctcatgccgctgttgatgcactatgtgagaaggcattaaaatatttgcctatagataaatgtagtagaattatacctgcacgtgctcgtgtagagtgttttgataaattcaaagtgaattcaacattagaacagtatgtcttttgtactgtaaatgcattgcctgagacgacagcagatatagttgtctttgatgaaatttcaatggccacaaattatgatttgagtgttgtcaatgccagattacgtgctaagcactatgtgtacattggcgaccctgctcaattacctgcaccacgcacattgctaactaagggcacactagaaccagaatatttcaattcagtgtgtagacttatgaaaactataggtccagacatgttcctcggaacttgtcggcgttgtcctgctgaaattgttgacactgtgagtgctttggtttatgataataagcttaaagcacataaagacaaatcagctcaatgctttaaaatgttttataagggtgttatcacgcatgatgtttcatctgcaattaacaggccacaaataggcgtggtaagagaattccttacacgtaaccctgcttggagaaaagctgtctttatttcaccttataattcacagaatgctgtagcctcaaagattttgggactaccaactcaaactgttgattcatcacagggctcagaatatgactatgtcatattcactcaaaccactgaaacagctcactcttgtaatgtaaacagatttaatgttgctattaccagagcaaaagtaggcatactttgcataatgtctgatagagacctttatgacaagttgcaatttacaagtcttgaaattccacgtaggaatgtggcaactttacaagctgaaaatgtaacaggactctttaaagattgtagtaaggtaatcactgggttacatcctacacaggcacctacacacctcagtgttgacactaaattcaaaactgaaggtttatgtgttgacatacctggcatacctaaggacatgacctatagaagactcatctctatgatgggttttaaaatgaattatcaagttaatggttaccctaacatgtttatcacccgcgaagaagctataagacatgtacgtgcatggattggcttcgatgtcgaggggtgtcatgctactagagaagctgttggtaccaatttacctttacagctaggtttttctacaggtgttaacctagttgctgtacctacaggttatgttgatacacctaataatacagatttttccagagttagtgctaaaccaccgcctggagatcaatttaaacacctcataccacttatgtacaaaggacttccttggaatgtagtgcgtataaagattgtacaaatgttaagtgacacacttaaaaatctctctgacagagtcgtatttgtcttatgggcacatggctttgagttgacatctatgaagtattttgtgaaaataggacctgagcgcacctgttgtctatgtgatagacgtgccacatgcttttccactgcttcagacacttatgcctgttggcatcattctattggatttgattacgtctataatccgtttatgattgatgttcaacaatggggttttacaggtaacctacaaagcaaccatgatctgtattgtcaagtccatggtaatgcacatgtagctagttgtgatgcaatcatgactaggtgtctagctgtccacgagtgctttgttaagcgtgttgactggactattgaatatcctataattggtgatgaactgaagattaatgcggcttgtagaaaggttcaacacatggttgttaaagctgcattattagcagacaaattcccagttcttcacgacattggtaaccctaaagctattaagtgtgtacctcaagctgatgtagaatggaagttctatgatgcacagccttgtagtgacaaagcttataaaatagaagaattattctattcttatgccacacattctgacaaattcacagatggtgtatgcctattttggaattgcaatgtcgatagatatcctgctaattccattgtttgtagatttgacactagagtgctatctaaccttaacttgcctggttgtgatggtggcagtttgtatgtaaataaacatgcattccacacaccagcttttgataaaagtgcttttgttaatttaaaacaattaccatttttctattactctgacagtccatgtgagtctcatggaaaacaagtagtgtcagatatagattatgtaccactaaagtctgctacgtgtataacacgttgcaatttaggtggtgctgtctgtagacatcatgctaatgagtacagattgtatctcgatgcttataacatgatgatctcagctggctttagcttgtgggtttacaaacaatttgatacttataacctctggaacacttttacaagacttcagagtttagaaaatgtggcttttaatgttgtaaataagggacactttgatggacaacagggtgaagtaccagtttctatcattaataacactgtttacacaaaagttgatggtgttgatgtagaattgtttgaaaataaaacaacattacctgttaatgtagcatttgagctttgggctaagcgcaacattaaaccagtaccagaggtgaaaatactcaataatttgggtgtggacattgctgctaatactgtgatctgggactacaaaagagatgctccagcacatatatctactattggtgtttgttctatgactgacatagccaagaaaccaactgaaacgatttgtgcaccactcactgtcttttttgatggtagagttgatggtcaagtagacttatttagaaatgcccgtaatggtgttcttattacagaaggtagtgttaaaggtttacaaccatctgtaggtcccaaacaagctagtcttaatggagtcacattaattggagaagccgtaaaaacacagttcaattattataagaaagttgatggtgttgtccaacaattacctgaaacttactttactcagagtagaaatttacaagaatttaaacccaggagtcaaatggaaattgatttcttagaattagctatggatgaattcattgaacggtataaattagaaggctatgccttcgaacatatcgtttatggagattttagtcatagtcagttaggtggtttacatctactgattggactagctaaacgttttaaggaatcaccttttgaattagaagattttattcctatggacagtacagttaaaaactatttcataacagatgcgcaaacaggttcatctaagtgtgtgtgttctgttattgatttattacttgatgattttgttgaaataataaaatcccaagatttatctgtagtttctaaggttgtcaaagtgactattgactatacagaaatttcatttatgctttggtgtaaagatggccatgtagaaacattttacccaaaattacaatctagtcaagcgtggcaaccgggtgttgctatgcctaatctttacaaaatgcaaagaatgctattagaaaagtgtgaccttcaaaattatggtgatagtgcaacattacctaaaggcataatgatgaatgtcgcaaaatatactcaactgtgtcaatatttaaacacattaacattagctgtaccctataatatgagagttatacattttggtgctggttctgataaaggagttgcaccaggtacagctgttttaagacagtggttgcctacgggtacgctgcttgtcgactcagatcttaatgactttgtctctgatgcagattcaactttgattggtgattgtgcaactgtacatacagctaataaatgggatctcattattagtgatatgtacgaccctaagactaaaaatgttacaaaagaaaatgactctaaagagggttttttcacttacatttgtgggtttatacaacaaaagctagctcttggaggttccgtggctataaagataacagaacattcttggaatgctgatctttataagctcatgggacacttcgcatggtggacagcctttgttactaatgtgaatgcgtcatcatctgaagcatttttaattggatgtaattatcttggcaaaccacgcgaacaaatagatggttatgtcatgcatgcaaattacatattttggaggaatacaaatccaattcagttgtcttcctattctttatttgacatgagtaaatttccccttaaattaaggggtactgctgttatgtctttaaaagaaggtcaaatcaatgatatgattttatctcttcttagtaaaggtagacttataattagagaaaacaacagagttgttatttctagtgatgttcttgttaacaactaaacgaacaatgtttgtttttcttgttttattgccactagtctctagtcagtgtgttaatcttacaaccagaactcaattaccccctgcatacactaattctttcacacgtggtgtttattaccctgacaaagttttcagatcctcagttttacattcaactcaggacttgttcttacctttcttttccaatgttacttggttccatgctatacatgtctctgggaccaatggtactaagaggtttgataaccctgtcctaccatttaatgatggtgtttattttgcttccactgagaagtctaacataataagaggctggatttttggtactactttagattcgaagacccagtccctacttattgttaataacgctactaatgttgttattaaagtctgtgaatttcaattttgtaatgatccatttttgggtgtttattaccacaaaaacaacaaaagttggatggaaagtgagttcagagtttattctagtgcgaataattgcacttttgaatatgtctctcagccttttcttatggaccttgaaggaaaacagggtaatttcaaaaatcttagggaatttgtgtttaagaatattgatggttattttaaaatatattctaagcacacgcctattaatttagtgcgtgatctccctcagggtttttcggctttagaaccattggtagatttgccaataggtattaacatcactaggtttcaaactttacttgctttacatagaagttatttgactcctggtgattcttcttcaggttggacagctggtgctgcagcttattatgtgggttatcttcaacctaggacttttctattaaaatataatgaaaatggaaccattacagatgctgtagactgtgcacttgaccctctctcagaaacaaagtgtacgttgaaatccttcactgtagaaaaaggaatctatcaaacttctaactttagagtccaaccaacagaatctattgttagatttcctaatattacaaacttgtgcccttttggtgaagtttttaacgccaccagatttgcatctgtttatgcttggaacaggaagagaatcagcaactgtgttgctgattattctgtcctatataattccgcatcattttccacttttaagtgttatggagtgtctcctactaaattaaatgatctctgctttactaatgtctatgcagattcatttgtaattagaggtgatgaagtcagacaaatcgctccagggcaaactggaaagattgctgattataattataaattaccagatgattttacaggctgcgttatagcttggaattctaacaatcttgattctaaggttggtggtaattataattacctgtatagattgtttaggaagtctaatctcaaaccttttgagagagatatttcaactgaaatctatcaggccggtagcacaccttgtaatggtgttgaaggttttaattgttactttcctttacaatcatatggtttccaacccactaatggtgttggttaccaaccatacagagtagtagtactttcttttgaacttctacatgcaccagcaactgtttgtggacctaaaaagtctactaatttggttaaaaacaaatgtgtcaatttcaacttcaatggtttaacaggcacaggtgttcttactgagtctaacaaaaagtttctgcctttccaacaatttggcagagacattgctgacactactgatgctgtccgtgatccacagacacttgagattcttgacattacaccatgttcttttggtggtgtcagtgttataacaccaggaacaaatacttctaaccaggttgctgttctttatcagggtgttaactgcacagaagtccctgttgctattcatgcagatcaacttactcctacttggcgtgtttattctacaggttctaatgtttttcaaacacgtgcaggctgtttaataggggctgaacatgtcaacaactcatatgagtgtgacatacccattggtgcaggtatatgcgctagttatcagactcagactaattctcctcggcgggcacgtagtgtagctagtcaatccatcattgcctacactatgtcacttggtgcagaaaattcagttgcttactctaataactctattgccatacccacaaattttactattagtgttaccacagaaattctaccagtgtctatgaccaagacatcagtagattgtacaatgtacatttgtggtgattcaactgaatgcagcaatcttttgttgcaatatggcagtttttgtacacaattaaaccgtgctttaactggaatagctgttgaacaagacaaaaacacccaagaagtttttgcacaagtcaaacaaatttacaaaacaccaccaattaaagattttggtggttttaatttttcacaaatattaccagatccatcaaaaccaagcaagaggtcatttattgaagatctacttttcaacaaagtgacacttgcagatgctggcttcatcaaacaatatggtgattgccttggtgatattgctgctagagacctcatttgtgcacaaaagtttaacggccttactgttttgccacctttgctcacagatgaaatgattgctcaatacacttctgcactgttagcgggtacaatcacttctggttggacctttggtgcaggtgctgcattacaaataccatttgctatgcaaatggcttataggtttaatggtattggagttacacagaatgttctctatgagaaccaaaaattgattgccaaccaatttaatagtgctattggcaaaattcaagactcactttcttccacagcaagtgcacttggaaaacttcaagatgtggtcaaccaaaatgcacaagctttaaacacgcttgttaaacaacttagctccaattttggtgcaatttcaagtgttttaaatgatatcctttcacgtcttgacaaagttgaggctgaagtgcaaattgataggttgatcacaggcagacttcaaagtttgcagacatatgtgactcaacaattaattagagctgcagaaatcagagcttctgctaatcttgctgctactaaaatgtcagagtgtgtacttggacaatcaaaaagagttgatttttgtggaaagggctatcatcttatgtccttccctcagtcagcacctcatggtgtagtcttcttgcatgtgacttatgtccctgcacaagaaaagaacttcacaactgctcctgccatttgtcatgatggaaaagcacactttcctcgtgaaggtgtctttgtttcaaatggcacacactggtttgtaacacaaaggaatttttatgaaccacaaatcattactacagacaacacatttgtgtctggtaactgtgatgttgtaataggaattgtcaacaacacagtttatgatcctttgcaacctgaattagactcattcaaggaggagttagataaatattttaagaatcatacatcaccagatgttgatttaggtgacatctctggcattaatgcttcagttgtaaacattcaaaaagaaattgaccgcctcaatgaggttgccaagaatttaaatgaatctctcatcgatctccaagaacttggaaagtatgagcagtatataaaatggccatggtacatttggctaggttttatagctggcttgattgccatagtaatggtgacaattatgctttgctgtatgaccagttgctgtagttgtctcaagggctgttgttcttgtggatcctgctgcaaatttgatgaanncgantctgagccagtgctcaaaggagtcaaattacattacacataaacgaacttatggatttgtttatgagaatcttcacaattggaactgtaactttgaagcaaggtgaaatcaaggatgctactccttcagattttgttcgcgctactgcaacgataccgatacaagcctcactccctttcggatggcttattgttggcgttgcacttcttgctgtttttcagagcgcttccaaaatcataaccctcaaaaagagatggcaactagcactctccaagggtgttcactttgtttgcaacttgctgttgttgtttgtaacagtttactcacaccttttgctcgttgctgctggccttgaagccccttttctctatctttatgctttagtctacttcttgcagagtataaactttgtaagaataataatgaggctttggctttgctggaaatgccgttccaaaaacccattactttatgatgccaactattttctttgctggcatactaattgttacgactattgtataccttacaatagtgtaacttcttcaattgtcattacttcaggtgatggcacaacaagtcctatttctgaacatgactaccagattggtggttatactgaaaaatgggaatctggagtaaaagactgtgttgtattacacagttacttcacttcagactattaccagctgtactcaactcaattgagtacagacactggtgttgaacatgttaccttcttcatctacaataaaattgttgatgagcctgaagaacatgtccaaattcacacaatcgacggttcatccggagttgttaatccagtaatggaaccaatttatgatgaaccgacgacgactactagcgtgcctttgtaagcacaagctgatgagtacgaacttatgtactcattcgtttcggaagagacaggtacgttaatagttaatagcgtacttctttttcttgctttcgtggtattcttgctagttacactagccatccttactgcgcttcgattgtgtgcgtactgctgcaatattgttaacgtgagtcttgtaaaaccttctttttacgtttactctcgtgttaaaaatctgaattcttctagagttcctgatcttccggtctaaacgaactaaatattatattagtttttctgtttggaactttaattttagccatggcagattccaacggtactattaccgttgaagagcttaaaaagctccttgaacaatggaacctagtaataggtttcctattccttacatggatttgtcttctacaatttgcctatgccaacaggaataggtttttgtatataattaagttaattttcctctggctgttatggccagtaactttagcttgttttgtgcttgctgctgtttacagaataaattggatcaccggtggaattgctatcgcaatggcttgtcttgtaggcttgatgtggctcagctacttcattgcttctttcagactgtttgcgcgtacgcgttccatgtggtcattcaatccagaaactaacattcttctcaacgtgccactccatggcactattctgaccagaccgcttctagaaagtgaactcgtaatcggagctgtgatccttcgtggacatcttcgtattgctggacaccatctaggacgctgtgacatcaaggacctgcctaaagaaatcactgttgctacatcacgaacgctttcttattacaaattgggagcttcgcagcgtgtagcaggtgactcaggttttgctgcatacagtcgctacaggattggcaactataaattaaacacagaccattccagtagcagtgacaatattgctttgcttgtacagtaagtgacaacagatgtttcatctcgttgactttcaggttactatagcagagatattactaattattatgaggacttttaaagtttccatttggaatcttgattacatcataaacctcataattaaaaatttatctaagtcactaactgagaataaatattctcaattagatgaagagcaaccaatggagattgattaaacgaacatgaaaattattcttttcttggcactgataacactcgctacttgtgagctttatcactaccaagagtgtgttagaggtacaacagtacttttaaaagaaccttgctcttctggaacatacgagggcaattcaccatttcatcctctagctgataacaaatttgcactgacttgctttagcactcaatttgcttttgcttgtcctgacggcgtaaaacacgtctatcagttacgtgccagatcagtttcacctaaactgttcatcagacaagaggaagttcaagaactttactctccaatttttcttattgttgcggcaatagtgtttataacactttgcttcacactcaaaagaaagacagaatgattgaactttcattaattgacttctatttgtgctttttagcctttctgctattccttgttttaattatgcttattatcttttggttctcacttgaactgcaagatcataatgaaacttgtcacgcctaaacgaacatgaaatttcttgttttcttaggaatcatcacaactgtagctgcatttcaccaagaatgtagtttacagtcatgtactcaacatcaaccatatgtagttgatgacccgtgtcctattcacttctattctaaatggtatattagagtaggagctagaaaatcagcacctttaattgaattgtgcgtggatgaggctggttctaaatcacccattcagtacatcgatatcggtaattatacagtttcctgtttaccttttacaattaattgccaggaacctaaattgggtagtcttgtagtgcgttgttcgttctatgaagactttttagagtatcatgacgttcgtgttgttttagatttcatctaaacgaacaaactaaaatgtctgataatggaccccaaaatcagcgaaatgcaccccgcattacgtttggtggaccctcagattcaactggcagtaaccagaatggagaacgcagtggggcgcgatcaaaacaacgtcggccccaaggtttacccaataatactgcgtcttggttcaccgctctcactcaacatggcaaggaagaccttaaattccctcgaggacaaggcgttccaattaacaccaatagcagtccagatgaccaaattggctactaccgaagagctaccagacgaattcgtggtggtgacggtaaaatgaaagatctcagtccaagatggtatttctactacctaggaactgggccagaagctggacttccctatggtgctaacaaagacggcatcatatgggttgcaactgagggagccttgaatacaccaaaagatcacattggcacccgcaatcctgctaacaatgctgcaatcgtgctacaacttcctcaaggaacaacattgccaaaaggcttctacgcagaagggagcagaggcggcagtcaagcctcttctcgttcctcatcacgtagtcgcaacagttcaagaaattcaactccaggcagcagtaggggaacttctcctgctagaatggctggcaatggcggtgatgctgctcttgctttgctgctgcttgacagattgaaccagcttgagagcaaaatgtctggtaaaggccaacaacaacaaggccaaactgtcactaagaaatctgctgctgaggcttctaagaagcctcggcaaaaacgtactgccactaaagcatacaatgtaacacaagctttcggcagacgtggtccagaacaaacccaaggaaattttggggaccaggaactaatcagacaaggaactgattacaaacattggccgcaaattgcacaatttgcccccagcgcttcagcgttcttcggaatgtcgcgcattggcatggaagtcacaccttcgggaacgtggttgacctacacaggtgccatcaaattggatgacaaagatccaaatttcaaagatcaagtcattttgctgaataagcatattgacgcatacaaaacattcccaccaacagagcctaaaaaggacaaaaagaagaaggctgatgaaactcaagccttaccgcagagacagaagaaacagcaaactgtgactcttcttcctgctgcagatttggatgatttctccaaacaattgcaacaatccatgagcagtgctgactcaactcaggcctaaactcatgcagaccacacaaggcagatgggctatataaacgttttcgcttttccgtttacgatatatagtctactcttgtgcagaatgaattctcgtaactacatagcacaagtagatgtagttaactttaatctcacatagcaatctttaatcagtgtgtaacattagggaggacttgaaagagccaccacattttcaccgaggccacgcggagtacgatcgagtgtacagtgaacaatgctagggagagctgcctatatggaagagccctaatgtgtaaaattaattttagtagtgctatccccatgtga

SEQ ID NO: 63 - DNA, 29809 bp, synthetic construct
  misc_feature 1..29809: note = Reconstituted virus 26
  source 1..29809: mol_type = other DNA
accaactttcgatctcttgtagatctgttctctaaacgaactttaaaatctgtgtggctgtcactcggctgcatgcttagtgcactcacgcagtataattaataactaattactgtcgttgacaggacacgagtaactcgtctatcttctgcaggctgcttacggtttcgtccgtgttgcagccgatcatcagcacatctaggttttgtccgggtgtgaccgaaaggtaagatggagagccttgtccctggtttcaacgagaaaacacacgtccaactcagtttgcctgttttacaggttcgcgacgtgctcgtacgtggctttggagactccgtggaggaggtcttatcagaggcacgtcaacatcttaaagatggcacttgtggcttagtagaagttgaaaaaggcgttttgcctcaacttgaacagccctatgtgttcatcaaacgttcggatgctcgaactgcacctcatggtcatgttatggttgagctggtagcagaactcgaaggcattcagtacggtcgtagtggtgagacacttggtgtccttgtccctcatgtgggcgaaataccagtggcttaccgcaaggttcttcttcgtaagaacggtaataaaggagctggtggccatagttacggcgccgatctaaagtcatttgacttaggcgacgagcttggcactgatccttatgaagattttcaagaaaactggaacactaaacatagcagtggtgttacccgtgaactcatgcgtgagcttaacggaggggcatacactcgctatgtcgataacaacttctgtggccctgatggctaccctcttgagtgcattaaagaccttctagcacgtgctggtaaagcttcatgcactttgtccgaacaactggactttattgacactaagaggggtgtatactgctgccgtgaacatgagcatgaaattgcttggtacacggaacgttctgaaaagagctatgaattgcagacaccttttgaaattaaattggcaaagaaatttgacaccttcaatggggaatgtccaaattttgtatttcccttaaattccataatcaagactattcaaccaagggttgaaaagaaaaagcttgatggctttatgggtagaattcgatctgtctatccagttgcgtcaccaaatgaatgcaaccaaatgtgcctttcaactctcatgaagtgtgatcattgtggtgaaacttcatggcagacgggcgattttgttaaagccacttgcgaattttgtggcactgagaatttgactaaagaaggtgccactacttgtggttacttaccccaaaatgctgttgttaaaatttattgtccagcatgtcacaattcagaagtaggacctgagcatagtcttgccgaataccataatgaatctggcttgaaaaccattcttcgtaagggtggtcgcactattgcctttggaggctgtgtgttctcttatgttggttgccataacaagtgtgcctattgggttccacgtgctagcgctaacataggttgtaaccatacaggtgttgttggagaaggttccgaaggtcttaatgacaaccttcttgaaatactccaaaaagagaaagtcaacatcaatattgttggtgactttaaacttaatgaagagatcgccattattttggcatctttttctgcttccacaagtgcttttgtggaaactgtgaaaggtttggattataaagcattcaaacaaattgttgaatcctgtggtaattttaaagttacaaaaggaaaagctaaaaaaggtgcctggaatattggtgaacagaaatcaatactgagtcctctttatgcatttgcatcagaggctgctcgtgttgtacgatcaattttctcccgcactcttgaaactgctcaaaattctgtgcgtgttttacagaaggccgctataacaatactagatggaatttcacagtattcactgagactcattgatgctatgatgttcacatctgatttggctactaacaatctagttgtaatggcctacattacaggtggtgttgttcagttgacttcgcagtggctaactaacatctttggcactgtttatgaaaaactcaaacccgtccttgattggcttgaagagaagtttaaggaaggtgtagagtttcttagagacggttgggaaattgttaaatttatctcaacctgtgcttgtgaaattgtcggtggacaaattgtcacctgtgcaaaggaaattaaggagagtgttcagacattctttaagcttgtaaataaatttttggctttgtgtgctgactctatcattattggtggagctaaacttaaagccttgaatttaggtgaaacatttgtcacgcactcaaagggattgtacagaaagtgtgttaaatccagagaagaaactggcctactcatgcctctaaaagccccaaaagaaattatcttcttagagggagaaacacttcccacagaagtgttaacagaggaagttgtcttgaaaactggtgatttacaaccattagaacaacctactagtgaagctgttgaagctccattggttggtacaccagtttgtattaacgggcttatgttgctcgaaatcaaagacacagaaaagtactgtgcccttgcacctaatatgatggtaacaaacaataccttcacactcaaaggcggtgcaccaacaaaggttacttttggtgatgacactgtgatagaagtgcaaggttacaagagtgtgaatatcacttttgaacttgatgaaaggattgataaagtacttaatgagaagtgctctgcctatacagttgaactcggtacagaagtaaatgagttcgcctgtgttgtggcagatgctgtcataaaaactttgcaaccagtatctgaattacttacaccactgggcattgatttagatgagtggagtatggctacatactacttatttgatgagtctggtgagtttaaattggcttcacatatgtattgttctttttaccctccagatgaggatgaagaagaaggtgattgtgaagaagaagagtttgagccatcaactcaatatgagtatggtactgaagatgattaccaaggtaaacctttggaatttggtgccacttctgctgctcttcaacctgaagaagagcaagaagaagattggttagatgatgatagtcaacaaactgttggtcaacaagacggcagtgaggacaatcagacaactactattcaaacaattgttgaggttcaacctcaattagagatggaacttacaccagttgttcagactattgaagtgaatagttttagtggttatttaaaacttactgacaatgtatacattaaaaatgcagacattgtggaagaagctaaaaaggtaaaaccaacagtggttgttaatgcagccaatgtttaccttaaacatggaggaggtgttgcaggagccttaaataaggctactaacaatgccatgcaagttgaatctgatgattacatagctactaatggaccacttaaagtgggtggtagttgtgttttaagcggacacaatcttgctaaacactgtcttcatgttgtcggcccaaatgttaacaaaggtgaagacattcaacttcttaagagtgcttatgaaaattttaatcagcacgaagttctacttgcaccattattatcagctggtatttttggtgctgaccctatacattctttaagagtttgtgtagatactgttcgcacaaatgtctacttagctgtctttgataaaaatctctatgacaaacttgtttcaagctttttggaaatgaagagtgaaaagcaagttgaacaaaagatcgctgagattcctaaagaggaagttaagccatttataactgaaagtaaaccttcagttgaacagagaaaacaagatgataagaaaatcaaagcttgtgttgaagaagttacaacaactctggaagaaactaagttcctcacagaaaacttgttactttatattgacattaatggcaatcttcatccagattctgccactcttgttagtgacattgacatcactttcttaaagaaagatgctccatatatagtgggtgatgttgttcaagagggtgttttaactgctgtggttatacctactaaaaaggctggtggcactactgaaatgctagcgaaagctttgagaaaagtgccaacagacaattatataaccacttacccgggtcagggtttaaatggttacactgtagaggaggcaaagacagtgcttaaaaagtgtaaaagtgccttttacattctaccatctattatctctaatgagaagcaagaaattcttggaactgtttcttggaatttgcgagaaatgcttgcacatgcagaagaaacacgcaaattaatgcctgtctgtgtggaaactaaagccatagtttcaactatacagcgtaaatataagggtattaaaatacaagagggtgtggttgattatggtgctagattttacttttacaccagtaaaacaactgtagcgtcacttatcaacacacttaacgatctaaatgaaactcttgttacaatgccacttggctatgtaacacatggcttaaatttggaagaagctgctcggtatatgagatctctcaaagtgccagctacagtttctgtttcttcacctgatgctgttacagcgtataatggttatcttacttcttcttctaaaacacctgaagaacattttattgaaaccatctcacttgctggttcctataaagattggtcctattctggacaatctacacaactaggtatagaatttcttaagagaggtgataaaagtgtatattacactagtaatcctaccacattccacctagatggtgaagttatcacctttgacaatcttaagacacttctttctttgagagaagtgaggactattaaggtgtttacaacagtagacaacattaacctccacacgcaagttgtggacatgtcaatgacatatggacaacagtttggtccaacttatttggatggagctgatgttactaaaataaaacctcataattcacatgaaggtaaaacattttatgttttacctaatgatgacactctacgtgttgaggcttttgagtactaccacacaactgatcctagttttctgggtaggtacatgtcagcattaaatcacactaaaaagtggaaatacccacaagttaatggtttaacttctattaaatgggcagataacaactgttatcttgccactgcattgttaacactccaacaaatagagttgaagtttaatccacctgctctacaagatgcttattacagagcaagggctggtgaagctgctaacttttgtgcacttatcttagcctactgtaataagacagtaggtgagttaggtgatgttagagaaacaatgagttacttgtttcaacatgccaatttagattcttgcaaaagagtcttgaacgtggtgtgtaaaacttgtggacaacagcagacaacccttaagggtgtagaagctgttatgtacatgggcacactttcttatgaacaatttaagaaaggtgttcagataccttgtacgtgtggtaaacaagctacaaaatatctagtacaacaggagtcaccttttgttatgatgtcagcaccacctgctcagtatgaacttaagcatggtacatttacttgtgctagtgagtacactggtaattaccagtgtggtcactataaacatataacttctaaagaaactttgtattgcatagacggtgctttacttacaaagtcctcagaatacaaaggtcctattacggatgttttctacaaagaaaacagttacacaacaaccataaaaccagttacttataaattggatggtgttgtttgtacagaaattgaccctaagttggacaattattataagaaagacaattcttatttcacagagcaaccaattgatcttgtaccaaaccaaccatatccaaacgcaagcttcgataattttaagtttgtatgtgataatatcaaatttgctgatgatttaaaccagttaactggttataagaaacctgcttcaagagagcttaaagttacatttttccctgacttaaatggtgatgtggtggctattgattataaacactacacaccctcttttaagaaaggagctaaattgttacataaacctattgtttggcatgttaacaatgcaactaataaagccacgtataaaccaaatacctggtgtatacgttgtctttggagcacaaaaccagttgaaacatcaaattcgtttgatgtactgaagtcagaggacgcgcagggaatggataatcttgcctgcgaagatctaaaaccagtctctgaagaagtagtggaaaatcctaccatacagaaagacgttcttgagtgtaatgtgaaaactaccgaagttgtaggagacattatacttaaaccagcaaataatagtttaaaaattacagaagaggttggccacacagatctaatggctgcttatgtagacaattctagtcttactattaagaaacctaatgaattatctagagtattaggtttgaaaacccttgctactcatggtttagctgctgttaatagtgtcccttgggatactatagctaattatgctaagccttttcttaacaaagttgttagtacaactactaacatagttacacggtgtttaaaccgtgtttgtactaattatatgccttatttctttactttattgctacaattgtgtacttttactagaagtacaaattctagaattaaagcatctatgccgactactatagcaaagaatactgttaagagtgtcggtaaattttgtctagaggcttcatttaattatttgaagtcacctaatttttctaaactgataaatattataatttggtttttactattaagtgtttgcctaggttctttaatctactcaaccgctgctttaggtgttttaatgtctaatttaggcatgccttcttactgtactggttacagagaaggctatttgaactctactaatgtcactattgcaacctactgtactggttctataccttgtagtgtttgtcttagtggtttagattctttagacacctatccttctttagaaactatacaaattaccatttcatcttttaaatgggatttaactgcttttggcttagttgcagagtggtttttggcatatattcttttcactaggtttttctatgtacttggattggctgcaatcatgcaattgtttttcagctattttgcagtacattttattagtaattcttggcttatgtggttaataattaatcttgtacaaatggccccgatttcagctatggttagaatgtacatcttctttgcatcattttattatgtatggaaaagttatgtgcatgttgtagacggttgtaattcatcaacttgtatgatgtgttacaaacgtaatagagcaacaagagtcgaatgtacaactattgttaatggtgttagaaggtccttttatgtctatgctaatggaggtaaaggcttttgcaaactacacaattggaattgtgttaattgtgatacattctgtgctggtagtacatttattagtgatgaagttgcgagagacttgtcactacagtttaaaagaccaataaatcctactgaccagtcttcttacatcgttgatagtgttacagtgaagaatggttccatccatctttactttgataaagctggtcaaaagacttatgaaagacattctctctctcattttgttaacttagacaacctgagagctaataacactaaaggttcattgcctattaatgttatagtttttgatggtaaatcaaaatgtgaagaatcatctgcaaaatcagcgtctgtttactacagtcagcttatgtgtcaacctatactgttactagatcaggcattagtgtctgatgttggtgatagtgcggaagttgcagttaaaatgtttgatgcttacgttaatacgttttcatcaacttttaacgtaccaatggaaaaactcaaaacactagttgcaactgcagaagctgaacttgcaaagaatgtgtccttagacaatgtcttatctacttttatttcagcagctcggcaagggtttgttgattcagatgtagaaactaaagatgttgttgaatgtcttaaattgtcacatcaatctgacatagaagttactggcgatagttgtaataactatatgctcacctataacaaagttgaaaacatgacaccccgtgaccttggtgcttgtattgactgtagtgcgcgtcatattaatgcgcaggtagcaaaaagtcacaacattgctttgatatggaacgttaaagatttcatgtcattgtctgaacaactacgaaaacaaatacgtagtgctgctaaaaagaataacttaccttttaagttgacatgtgcaactactagacaagttgttaatgttgtaacaacaaagatagcacttaagggtggtaaaattgttaataattggttgaagcagttaattaaagttacacttgtgttcctttttgttgctgctattttctatttaataacacctgttcatgtcatgtctaaacatactgacttttcaagtgaaatcataggatacaaggctattgatggtggtgtcactcgtgacatagcatctacagatacttgttttgctaacaaacatgctgattttgacacatggtttagccagcgtggtggtagttatactaatgacaaagcttgcccattgattgctgcagtcataacaagagaagtgggttttgtcgtgcctggtttgcctggcacgatattacgcacaactaatggtgactttttgcatttcttacctagagtttttagtgcagttggtaacatctgttacacaccatcaaaacttatagagtacactgactttgcaacatcagcttgtgttttggctgctgaatgtacaatttttaaagatgcttctggtaagccagtaccatattgttatgataccaatgtactagaaggttctgttgcttatgaaagtttacgccctgacacacgttatgtgctcatggatggctctattattcaatttcctaacacctaccttgaaggttctgttagagtggtaacaacttttgattctgagtactgtaggcacggcacttgtgaaagatcagaagctggtgtttgtgtatctactagtggtagatgggtacttaacaatgattattacagatctttaccaggagttttctgtggtgtagatgctgtaaatttacttactaatatgtttacaccactaattcaacctattggtgctttggacatatcagcatctatagtagctggtggtattgtagctatcgtagtaacatgccttgcctactattttatgaggtttagaagagcttttggtgaatacagtcatgtagttgcctttaatactttactattccttatgtcattcactgtactctgtttaacaccagtttactcattcttacctggtgtttattctgttatttacttgtacttgacattttatcttactaatgatgtttcttttttagcacatattcagtggatggttatgttcacacctttagtacctttctggataacaattgcttatatcatttgtatttccacaaagcatttctattggttctttagtaattacctaaagagacgtgtagtctttaatggtgtttcctttagtacttttgaagaagctgcgctgtgcacctttttgttaaataaagaaatgtatctaaagttgcgtagtgatgtgctattacctcttacgcaatataatagatacttagctctttataataagtacaagtattttagtggagcaatggatacaactagctacagagaagctgcttgttgtcatctcgcaaaggctctcaatgacttcagtaactcaggttctgatgttctttaccaaccaccacaaacctctatcacctcagctgttttgcagagtggttttagaaaaatggcattcccatctggtaaagttgagggttgtatggtacaagtaacttgtggtacaactacacttaacggtctttggcttgatgacgtagtttactgtccaagacatgtgatctgcacctctgaagacatgcttaaccctaattatgaagatttactcattcgtaagtctaatcataatttcttggtacaggctggtaatgttcaactcagggttattggacattctatgcaaaattgtgtacttaagcttaaggttgatacagccaatcctaagacacctaagtataagtttgttcgcattcaaccaggacagactttttcagtgttagcttgttacaatggttcaccatctggtgtttaccaatgtgctatgaggcccaatttcactattaagggttcattccttaatggttcatgtggtagtgttggttttaacatagattatgactgtgtctctttttgttacatgcaccatatggaattaccaactggagttcatgctggcacagacttagaaggtaacttttatggaccttttgttgacaggcaaacagcacaagcagctggtacggacacaactattacagttaatgttttagcttggttgtacgctgctgttataaatggagacaggtggtttctcaatcgatttaccacaactcttaatgactttaaccttgtggctatgaagtacaattatgaacctctaacacaagaccatgttgacatactaggacctctttctgctcaaactggaattgccgttttagatatgtgtgcttcattaaaagaattactgcaaaatggtatgaatggacgtaccatattgggtagtgctttattagaagatgaatttacaccttttgatgttgttagacaatgctcaggtgttactttccaaagtgcagtgaaaagaacaatcaagggtacacaccactggttgttactcacaattttgacttcacttttagttttagtccagagtactcaatggtctttgttcttttttttgtatgaaaatgcctttttaccttttgctatgggtattattgctatgtctgcttttgcaatgatgtttgtcaaacataagcatgcatttctctgtttgtttttgttaccttctcttgccactgtagcttattttaatatggtctatatgcctgctagttgggtgatgcgtattatgacatggttggatatggttgatactagtttgtctggttttaagctaaaagactgtgttatgtatgcatcagctgtagtgttactaatccttatgacagcaagaactgtgtatgatgatggtgctaggagagtgtggacacttatgaatgtcttgacactcgtttataaagtttattatggtaatgctttagatcaagccatttccatgtgggctcttataatctctgttacttctaactactcaggtgtagttacaactgtcatgtttttggccagaggtattgtttttatgtgtgttgagtattgccctattttcttcataactggtaatacacttcagtgtataatgctagtttattgtttcttaggctatttttgtacttgttactttggcctcttttgtttactcaaccgctactttagactgactcttggtgtttatgattacttagtttctacacaggagtttagatatatgaattcacagggactactcccacccaagaatagcatagatgccttcaaactcaacattaaattgttgggtgttggtggcaaaccttgtatcaaagtagccactgtacagtctaaaatgtcagatgtaaagtgcacatcagtagtcttactctcagttttgcaacaactcagagtagaatcatcatctaaattgtgggctcaatgtgtccagttacacaatgacattctcttagctaaagatactactgaagcctttgaaaaaatggtttcactactttctgttttgctttccatgcagggtgctgtagacataaacaagctttgtgaagaaatgctggacaacagggcaaccttacaagctatagcctcagagtttagttcccttccatcatatgcagcttttgctactgctcaagaagcttatgagcaggctgttgctaatggtgattctgaagttgttcttaaaaagttgaagaagtctttgaatgtggctaaatctgaatttgaccgtgatgcagccatgcaacgtaagttggaaaagatggctgatcaagctatgacccaaatgtataaacaggctagatctgaggacaagagggcaaaagttactagtgctatgcagacaatgcttttcactatgcttagaaagttggataatgatgcactcaacaacattatcaacaatgcaagagatggttgtgttcccttgaacataatacctcttacaacagcagccaaactaatggttgtcataccagactataacacatataaaaatacgtgtgatggtacaacatttacttatgcatcagcattgtgggaaatccaacaggttgtagatgcagatagtaaaattgttcaacttagtgaaattagtatggacaattcacctaatttagcatggcctcttattgtaacagctttaagggccaattctgctgtcaaattacagaataatgagcttagtcctgttgcactacgacagatgtcttgtgctgccggtactacacaaactgcttgcactgatgacaatgcgttagcttactacaacacaacaaagggaggtaggtttgtacttgcactgttatccgatttacaggatttgaaatgggctagattccctaagagtgatggaactggtactatctatacagaactggaaccaccttgtaggtttgttacagacacacctaaaggtcctaaagtgaagtatttatactttattaaaggattaaacaacctaaatagaggtatggtacttggtagtttagctgccacagtacgtctacaagctggtaatgcaacagaagtgcctgccaattcaactgtattatctttctgtgcttttgctgtagatgctgctaaagcttacaaagattatctagctagtgggggacaaccaatcactaattgtgttaagatgttgtgtacacacactggtactggtcaggcaataacagttacaccggaagccaatatggatcaagaatcctttggtggtgcatcgtgttgtctgtactgccgttgccacatagatcatccaaatcctaaaggattttgtgacttaaaaggtaagtatgtacaaatacctacaacttgtgctaatgaccctgtgggttttacacttaaaaacacagtctgtaccgtctgcggtatgtggaaaggttatggctgtagttgtgatcaactccgcgaacccatgcttcagtcagctgatgcacaatcgtttttaaacgggtttgcggtgtaagtgcagcccgtcttacaccgtgcggcacaggcactagtactgatgtcgtatacagggcttttgacatctacaatgataaagtagctggttttgctaaattcctaaaaactaattgttgtcgcttccaagaaaaggacgaagatgacaatttaattgattcttactttgtagttaagagacacactttctctaactaccaacatgaagaaacaatttataatttacttaaggattgtccagctgttgctaaacatgacttctttaagtttagaatagacggtgacatggtaccacatatatcacgtcaacgtcttactaaatacacaatggcagacctcgtctatgctttaaggcattttgatgaaggtaattgtgacacattaaaagaaatacttgtcacatacaattgttgtgatgatgattatttcaataaaaaggactggtatgattttgtagaaaacccagatatattacgcgtatacgccaacttaggtgaacgtgtacgccaagctttgttaaaaacagtacaattctgtgatgccatgcgaaatgctggtattgttggtgtactgacattagataatcaagatctcaatggtaactggtatgatttcggtgatttcatacaaaccacgccaggtagtggagttcctgttgtagattcttattattcattgttaatgcctatattaaccttgaccagggctttaactgcagagtcacatgttgacactgacttaacaaagccttacattaagtgggatttgttaaaatatgacttcacggaagagaggttaaaactctttgaccgttattttaaatattgggatcagacataccacccaaattgtgttaactgtttggatgacagatgcattctgcattgtgcaaactttaatgttttattctctacagtgttcccacttacaagttttggaccactagtgagaaaaatatttgttgatggtgttccatttgtagtttcaactggataccacttcagagagctaggtgttgtacataatcaggatgtaaatttacatagctctagacttagttttaaggaattacttgtgtatgctgctgaccctgctatgcacgctgcttctggtaatctattactagataaacgcactacgtgcttttcagtagctgcacttactaacaatgttgcttttcaaactgtcaaacccggtaattttaacaaagacttctatgactttgctgtgtctaagggtttctttaaggaaggaagttctgttgaattaaaacacttcttctttgctcaggatggtaatgctgctatcagcgattatgactactatcgttataatctaccaacaatgtgtgatatcagacaactactatttgtagttgaagttgttgataagtactttgattgttacgatggtggctgtattaatgctaaccaagtcatcgtcaacaacctagacaaatcagctggttttccatttaataaatggggtaaggctagactttattatgattcaatgagttatgaggatcaagatgcacttttcgcatatacaaaacgtaatgtcatccctactataactcaaatgaatcttaagtatgccattagtgcaaagaatagagctcgcaccgtagctggtgtctctatctgtagtactatgaccaatagacagtttcatcaaaaattattgaaatcaatagccgccactagaggagctactgtagtaattggaacaagcaaattctatggtggttggcacaacatgttaaaaactgtttatagtgatgtagaaaaccctcaccttatgggttgggattatcctaaatgtgatagagccatgcctaatatgcttagaattatggcctcacttgttcttgctcgcaaacatacaacgtgttgtagcttgtcacaccgtttctatagattagctaatgagtgtgctcaagtattgagtgaaatggtcatgtgtggcggttcactatatgttaaaccaggtggaacctcatcaggagatgccacaactgcttatgctaatagtgtttttaacatttgtcaagctgtcacggccaatgttaatgcacttttatctactgatggtaacaaaattgccgataagtatgtccgcaatttacaacacagactttatgagtgtctctatagaaatagagatgttgacacagactttgtgaatgagttttacgcatatttgcgtaaacatttctcaatgatgatactctctgacgatgctgttgtgtgtttcaatagcacttatgcatctcaaggtctagtggctagcataaagaactttaagtcagttctttattatcaaaacaatgtttttatgtctgaagcaaaatgttggactgagactgaccttactaaaggacctcatgaattttgctctcaacatacaatgctagttaaacagggtgatgattatgtgtaccttccttacccagatccatcaagaatcctaggggccggctgttttgtagatgatatcgtaaaaacagatggtacacttatgattgaacggttcgtgtctttagctatagatgcttacccacttactaaacatcctaatcaggagtatgctgatgtctttcatttgtacttacaatacataagaaagctacatgatgagttaacaggacacatgttagacatgtattctgttatgcttactaatgataacacttcaaggtattgggaacctgagttttatgaggctatgtacacaccgcatacagtcttacaggctgttggggcttgtgttctttgcaattcacagacttcattaagatgtggtgcttgcatacgtagaccattcttatgttgtaaatgctgttacgaccatgtcatatcaacatcacataaattagtcttgtctgttaatccgtatgtttgcaatgctccaggttgtgatgtcacagatgtgactcaactttacttaggaggtatgagctattattgtaaatcacataaaccacccattagttttccattgtgtgctaatggacaagtttttggtttatataaaaatacatgtgttggtagcgataatgttactgactttaatgcaattgcaacatgtgactggacaaatgctggtgattacattttagctaacacctgtactgaaagactcaagctttttgcagcagaaacgctcaaagctactgaggagacatttaaactgtcttatggtattgctactgtacgtgaagtgctgtctgacagagaattacatctttcatgggaagttggtaaacctagaccaccacttaaccgaaattatgtctttactggttatcgtgtaactaaaaacagtaaagtacaaataggagagtacacctttgaaaaaggtgactatggtgatgctgttgtttaccgaggtacaacaacttacaaattaaatgttggtgattattttgtgctgacatcacatacagtaatgccattaagtgcacctacactagtgccacaagagcactatgttagaattactggcttatacccaacactcaatatctcagatgagttttctagcaatgttgcaaattatcaaaaggttggtatgcaaaagtattctacactccagggaccacctggtactggtaagagtcattttgctattggcctagctctctactacccttctgctcgcatagtgtatacagcttgctctcatgccgctgttgatgcactatgtgagaaggcattaaaatatttgcctatagataaatgtagtagaattatacctgcacgtgctcgtgtagagtgttttgataaattcaaagtgaattcaacattagaacagtatgtcttttgtactgtaaatgcattgcctgagacgacagcagatatagttgtctttgatgaaatttcaatggccacaaattatgatttgagtgttgtcaatgccagattacgtgctaagcactatgtgtacattggcgaccctgctcaattacctgcaccacgcacattgctaactaagggcacactagaaccagaatatttcaattcagtgtgtagacttatgaaaactataggtccagacatgttcctcggaacttgtcggcgttgtcctgctgaaattgttgacactgtgagtgctttggtttatgataataagcttaaagcacataaagacaaatcagctcaatgctttaaaatgttttataagggtgttatcacgcatgatgtttcatctgcaattaacaggccacaaataggcgtggtaagagaattccttacacgtaaccctgcttggagaaaagctgtctttatttcaccttataattcacagaatgctgtagcctcaaagattttgggactaccaactcaaactgttgattcatcacagggctcagaatatgactatgtcatattcactcaaaccactgaaacagctcactcttgtaatgtaaacagatttaatgttgctattaccagagcaaaagtaggcatactttgcataatgtctgatagagacctttatgacaagttgcaatttacaagtcttgaaattccacgtaggaatgtggcaactttacaagctgaaaatgtaacaggactctttaaagattgtagtaaggtaatcactgggttacatcctacacaggcacctacacacctcagtgttgacactaaattcaaaactgaaggtttatgtgttgacatacctggcatacctaaggacatgacctatagaagactcatctctatgatgggttttaaaatgaattatcaagttaatggttaccctaacatgtttatcacccgcgaagaagctataagacatgtacgtgcatggattggcttcgatgtcgaggggtgtcatgctactagagaagctgttggtaccaatttacctttacagctaggtttttctacaggtgttaacctagttgctgtacctacaggttatgttgatacacctaataatacagatttttccagagttagtgctaaaccaccgcctggagatcaatttaaacacctcataccacttatgtacaaaggacttccttggaatgtagtgcgtataaagattgtacaaatgttaagtgacacacttaaaaatctctctgacagagtcgtatttgtcttatgggcacatggctttgagttgacatctatgaagtattttgtgaaaataggacctgagcgcacctgttgtctatgtgatagacgtgccacatgcttttccactgcttcagacacttatgcctgttggcatcattctattggatttgattacgtctataatccgtttatgattgatgttcaacaatggggttttacaggtaacctacaaagcaaccatgatctgtattgtcaagtccatggtaatgcacatgtagctagttgtgatgcaatcatgactaggtgtctagctgtccacgagtgctttgttaagcgtgttgactggactattgaatatcctataattggtgatgaactgaagattaatgcggcttgtagaaaggttcaacacatggttgttaaagctgcattattagcagacaaattcccagttcttcacgacattggtaaccctaaagctattaagtgtgtacctcaagctgatgtagaatggaagttctatgatgcacagccttgtagtgacaaagcttataaaatagaagaattattctattcttatgccacacattctgacaaattcacagatggtgtatgcctattttggaattgcaatgtcgatagatatcctgctaattccattgtttgtagatttgacactagagtgctatctaaccttaacttgcctggttgtgatggtggcagtttgtatgtaaataaacatgcattccacacaccagcttttgataaaagtgcttttgttaatttaaaacaattaccatttttctattactctgacagtccatgtgagtctcatggaaaacaagtagtgtcagatatagattatgtaccactaaagtctgctacgtgtataacacgttgcaatttaggtggtgctgtctgtagacatcatgctaatgagtacagattgtatctcgatgcttataacatgatgatctcagctggctttagcttgtgggtttacaaacaatttgatacttataacctctggaacacttttacaagacttcagagtttagaaaatgtggcttttaatgttgtaaataagggacactttgatggacaacagggtgaagtaccagtttctatcattaataacactgtttacacaaaagttgatggtgttgatgtagaattgtttgaaaataaaacaacattacctgttaatgtagcatttgagctttgggctaagcgcaacattaaaccagtaccagaggtgaaaatactcaataatttgggtgtggacattgctgctaatactgtgatctgggactacaaaagagatgctccagcacatatatctactattggtgtttgttctatgactgacatagccaagaaaccaactgaaacgatttgtgcaccactcactgtcttttttgatggtagagttgatggtcaagtagacttatttagaaatgcccgtaatggtgttcttattacagaaggtagtgttaaaggtttacaaccatctgtaggtcccaaacaagctagtcttaatggagtcacattaattggagaagccgtaaaaacacagttcaattattataagaaagttgatggtgttgtccaacaattacctgaaacttactttactcagagtagaaatttacaagaatttaaacccaggagtcaaatggaaattgatttcttagaattagctatggatgaattcattgaacggtataaattagaaggctatgccttcgaacatatcgtttatggagattttagtcatagtcagttaggtggtttacatctactgattggactagctaaacgttttaaggaatcaccttttgaattagaagattttattcctatggacagtacagttaaaaactatttcataacagatgcgcaaacaggttcatctaagtgtgtgtgttctgttattgatttattacttgatgattttgttgaaataataaaatcccaagatttatctgtagtttctaaggttgtcaaagtgactattgactatacagaaatttcatttatgctttggtgtaaagatggccatgtagaaacattttacccaaaattacaatctagtcaagcgtggcaaccgggtgttgctatgcctaatctttacaaaatgcaaagaatgctattagaaaagtgtgaccttcaaaattatggtgatagtgcaacattacctaaaggcataatgatgaatgtcgcaaaatatactcaactgtgtcaatatttaaacacattaacattagctgtaccctataatatgagagttatacattttggtgctggttctgataaaggagttgcaccaggtacagctgttttaagacagtggttgcctacgggtacgctgcttgtcgactcagatcttaatgactttgtctctgatgcagattcaactttgattggtgattgtgcaactgtacatacagctaataaatgggatctcattattagtgatatgtacgaccctaagactaaaaatgttacaaaagaaaatgactctaaagagggttttttcacttacatttgtgggtttatacaacaaaagctagctcttggaggttccgtggctataaagataacagaacattcttggaatgctgatctttataagctcatgggacacttcgcatggtggacagcctttgttactaatgtgaatgcgtcatcatctgaagcatttttaattggatgtaattatcttggcaaaccacgcgaacaaatagatggttatgtcatgcatgcaaattacatattttggaggaatacaaatccaattcagttgtcttcctattctttatttgacatgagtaaatttccccttaaattaaggggtactgctgttatgtctttaaaagaaggtcaaatcaatgatatgattttatctcttcttagtaaaggtagacttataattagagaaaacaacagagttgttatttctagtgatgttcttgttaacaactaaacgaacaatgtttgtttttcttgttttattgccactagtctctagtcagtgtgttaatcttacaaccagaactcaattaccccctgcatacactaattctttcacacgtggtgtttattaccctgacaaagttttcagatcctcagttttacattcaactcaggacttgttcttacctttcttttccaatgttacttggttccatgctatacatgtctctgggaccaatggtactaagaggtttgataaccctgtcctaccatttaatgatggtgtttattttgcttccactgagaagtctaacataataagaggctggatttttggtactactttagattcgaagacccagtccctacttattgttaataacgctactaatgttgttattaaagtctgtgaatttcaattttgtaatgatccatttttgggtgtttattaccacaaaaacaacaaaagttggatggaaagtgagttcagagtttattctagtgcgaataattgcacttttgaatatgtctctcagccttttcttatggaccttgaaggaaaacagggtaatttcaaaaatcttagggaatttgtgtttaagaatattgatggttattttaaaatatattctaagcacacgcctattaatttagtgcgtgatctccctcagggtttttcggctttagaaccattggtagatttgccaataggtattaacatcactaggtttcaaactttacttgctttacatagaagttatttgactcctggtgattcttcttcaggttggacagctggtgctgcagcttattatgtgggttatcttcaacctaggacttttctattaaaatataatgaaaatggaaccattacagatgctgtagactgtgcacttgaccctctctcagaaacaaagtgtacgttgaaatccttcactgtagaaaaaggaatctatcaaacttctaactttagagtccaaccaacagaatctattgttagatttcctaatattacaaacttgtgcccttttggtgaagtttttaacgccaccagatttgcatctgtttatgcttggaacaggaagagaatcagcaactgtgttgctgattattctgtcctatataattccgcatcattttccacttttaagtgttatggagtgtctcctactaaattaaatgatctctgctttactaatgtctatgcagattcatttgtaattagaggtgatgaagtcagacaaatcgctccagggcaaactggaaagattgctgattataattataaattaccagatgattttacaggctgcgttatagcttggaattctaacaatcttgattctaaggttggtggtaattataattacctgtatagattgtttaggaagtctaatctcaaaccttttgagagagatatttcaactgaaatctatcaggccggtagcacaccttgtaatggtgttgaaggttttaattgttactttcctttacaatcatatggtttccaacccactaatggtgttggttaccaaccatacagagtagtagtactttcttttgaacttctacatgcaccagcaactgtttgtggacctaaaaagtctactaatttggttaaaaacaaatgtgtcaatttcaacttcaatggtttaacaggcacaggtgttcttactgagtctaacaaaaagtttctgcctttccaacaatttggcagagacattgctgacactactgatgctgtccgtgatccacagacacttgagattcttgacattacaccatgttcttttggtggtgtcagtgttataacaccaggaacaaatacttctaaccaggttgctgttctttatcagggtgttaactgcacagaagtccctgttgctattcatgcagatcaacttactcctacttggcgtgtttattctacaggttctaatgtttttcaaacacgtgcaggctgtttaataggggctgaacatgtcaacaactcatatgagtgtgacatacccattggtgcaggtatatgcgctagttatcagactcagactaattctcctcggcgggcacgtagtgtagctagtcaatccatcattgcctacactatgtcacttggtgcagaaaattcagttgcttactctaataactctattgccatacccacaaattttactattagtgttaccacagaaattctaccagtgtctatgaccaagacatcagtagattgtacaatgtacatttgtggtgattcaactgaatgcagcaatcttttgttgcaatatggcagtttttgtacacaattaaaccgtgctttaactggaatagctgttgaacaagacaaaaacacccaagaagtttttgcacaagtcaaacaaatttacaaaacaccaccaattaaagattttggtggttttaatttttcacaaatattaccagatccatcaaaaccaagcaagaggtcatttattgaagatctacttttcaacaaagtgacacttgcagatgctggcttcatcaaacaatatggtgattgccttggtgatattgctgctagagacctcatttgtgcacaaaagtttaacggccttactgttttgccacctttgctcacagatgaaatgattgctcaatacacttctgcactgttagcgggtacaatcacttctggttggacctttggtgcaggtgctgcattacaaataccatttgctatgcaaatggcttataggtttaatggtattggagttacacagaatgttctctatgagaaccaaaaattgattgccaaccaatttaatagtgctattggcaaaattcaagactcactttcttccacagcaagtgcacttggaaaacttcaagatgtggtcaaccaaaatgcacaagctttaaacacgcttgttaaacaacttagctccaattttggtgcaatttcaagtgttttaaatgatatcctttcacgtcttgacaaagttgaggctgaagtgcaaattgataggttgatcacaggcagacttcaaagtttgcagacatatgtgactcaacaattaattagagctgcagaaatcagagcttctgctaatcttgctgctactaaaatgtcagagtgtgtacttggacaatcaaaaagagttgatttttgtggaaagggctatcatcttatgtccttccctcagtcagcacctcatggtgtagtcttcttgcatgtgacttatgtccctgcacaagaaaagaacttcacaactgctcctgccatttgtcatgatggaaaagcacactttcctcgtgaaggtgtctttgtttcaaatggcacacactggtttgtaacacaaaggaatttttatgaaccacaaatcattactacagacaacacatttgtgtctggtaactgtgatgttgtaataggaattgtcaacaacacagtttatgatcctttgcaacctgaattagactcattcaaggaggagttagataaatattttaagaatcatacatcaccagatgttgatttaggtgacatctctggcattaatgcttcagttgtaaacattcaaaaagaaattgaccgcctcaatgaggttgccaagaatttaaatgaatctctcatcgatctccaagaacttggaaagtatgagcagtatataaaatggccatggtacatttggctaggttttatagctggcttgattgccatagtaatggtgacaattatgctttgctgtatgaccagttgctgtagttgtctcaagggctgttgttcttgtggatcctgctgcaaatttgatgaagangactctgagccagtgctcaaaggagtcaaattacattacacataaacgaacttatggatttgtttatgagaatcttcacaattggaactgtaactttgaagcaaggtgaaatcaaggatgctactccttcagattttgttcgcgctactgcaacgataccgatacaagcctcactccctttcggatggcttattgttggcgttgcacttcttgctgtttttcagagcgcttccaaaatcataaccctcaaaaagagatggcaactagcactctccaagggtgttcactttgtttgcaacttgctgttgttgtttgtaacagtttactcacaccttttgctcgttgctgctggccttgaagccccttttctctatctttatgctttagtctacttcttgcagagtataaactttgtaagaataataatgaggctttggctttgctggaaatgccgttccaaaaacccattactttatgatgccaactattttctttgctggcatactaattgttacgactattgtataccttacaatagtgtaacttcttcaattgtcattacttcaggtgatggcacaacaagtcctatttctgaacatgactaccagattggtggttatactgaaaaatgggaatctggagtaaaagactgtgttgtattacacagttacttcacttcagactattaccagctgtactcaactcaattgagtacagacactggtgttgaacatgttaccttcttcatctacaataaaattgttgatgagcctgaagaacatgtccaaattcacacaatcgacggttcatccggagttgttaatccagtaatggaaccaatttatgatgaaccgacgacgactactagcgtgcctttgtaagcacaagctgatgagtacgaacttatgtactcattcgtttcggaagagacaggtacgttaatagttaatagcgtacttctttttcttgctttcgtggtattcttgctagttacactagccatccttactgcgcttcgattgtgtgcgtactgctgcaatattgttaacgtgagtcttgtaaaaccttctttttacgtttactctcgtgttaaaaatctgaattcttctagagttcctgatcttccggtctaaacgaactaaatattatattagtttttctgtttggaactttaattttagccatggcagattccaacggtactattaccgttgaagagcttaaaaagctccttgaacaatggaacctagtaataggtttcctattccttacatggatttgtcttctacaatttgcctatgccaacaggaataggtttttgtatataattaagttaattttcctctggctgttatggccagtaactttagcttgttttgtgcttgctgctgtttacagaataaattggatcaccggtggaattgctatcgcaatggcttgtcttgtaggcttgatgtggctcagctacttcattgcttctttcagactgtttgcgcgtacgcgttccatgtggtcattcaatccagaaactaacattcttctcaacgtgccactccatggcactattctgaccagaccgcttctagaaagtgaactcgtaatcggagctgtgatccttcgtggacatcttcgtattgctggacaccatctaggacgctgtgacatcaaggacctgcctaaagaaatcactgttgctacatcacgaacgctttcttattacaaattgggagcttcgcagcgtgtagcaggtgactcaggttttgctgcatacagtcgctacaggattggcaactataaattaaacacagaccattccagtagcagtgacaatattgctttgcttgtacagtaagtgacaacagatgtttcatctcgttgactttcaggttactatagcagagatattactaattattatgaggacttttaaagtttccatttggaatcttgattacatcataaacctcataattaaaaatttatctaagtcactaactgagaataaatattctcaattagatgaagagcaaccaatggagattgattaaacgaacatgaaaattattcttttcttggcactgataacactcgctacttgtgagctttatcactaccaagagtgtgttagaggtacaacagtacttttaaaagaaccttgctcttctggaacatacgagggcaattcaccatttcatcctctagctgataacaaatttgcactgacttgctttagcactcaatttgcttttgcttgtcctgacggcgtaaaacacgtctatcagttacgtgccagatcagtttcacctaaactgttcatcagacaagaggaagttcaagaactttactctccaatttttcttattgttgcggcaatagtgtttataacactttgcttcacactcaaaagaaagacagaatgattgaactttcattaattgacttctatttgtgctttttagcctttctgctattccttgttttaattatgcttattatcttttggttctcacttgaactgcaagatcataatgaaacttgtcacgcctaaacgaacatgaaatttcttgttttcttaggaatcatcacaactgtagctgcatttcaccaagaatgtagtttacagtcatgtactcaacatcaaccatatgtagttgatgacccgtgtcctattcacttctattctaaatggtatattagagtaggagctagaaaatcagcacctttaattgaattgtgcgtggatgaggctggttctaaatcacccattcagtacatcgatatcggtaattatacagtttcctgtttaccttttacaattaattgccaggaacctaaattgggtagtcttgtagtgcgttgttcgttctatgaagactttttagagtatcatgacgttcgtgttgttttagatttcatctaaacgaacaaactaaaatgtctgataatggaccccaaaatcagcgaaatgcaccccgcattacgtttggtggaccctcagattcaactggcagtaaccagaatggagaacgcagtggggcgcgatcaaaacaacgtcggccccaaggtttacccaataatactgcgtcttggttcaccgctctcactcaacatggcaaggaagaccttaaattccctcgaggacaaggcgttccaattaacaccaatagcagtccagatgaccaaattggctactaccgaagagctaccagacgaattcgtggtggtgacggtaaaatgaaagatctcagtccaagatggtatttctactacctaggaactgggccagaagctggacttccctatggtgctaacaaagacggcatcatatgggttgcaactgagggagccttgaatacaccaaaagatcacattggcacccgcaatcctgctaacaatgctgcaatcgtgctacaacttcctcaaggaacaacattgccaaaaggcttctacgcagaagggagcagaggcggcagtcaagcctcttctcgttcctcatcacgtagtcgcaacagttcaagaaattcaactccaggcagcagtaggggaacttctcctgctagaatggctggcaatggcggtgatgctgctcttgctttgctgctgcttgacagattgaaccagcttgagagcaaaatgtctggtaaaggccaacaacaacaaggccaaactgtcactaagaaatctgctgctgaggcttctaagaagcctcggcaaaaacgtactgccactaaagcatacaatgtaacacaagctttcggcagacgtggtccagaacaaacccaaggaaattttggggaccaggaactaatcagacaaggaactgattacaaacattggccgcaaattgcacaatttgcccccagcgcttcagcgttcttcggaatgtcgcgcattggcatggaagtcacaccttcgggaacgtggttgacctacacaggtgccatcaaattggatgacaaagatccaaatttcaaagatcaagtcattttgctgaataagcatattgacgcatacaaaacattcccaccaacagagcctaaaaaggacaaaaagaagaaggctgatgaaactcaagccttaccgcagagacagaagaaacagcaaactgtgactcttcttcctgctgcagatttggatgatttctccaaacaattgcaacaatccatgagcagtgctgactcaactcaggcctaaactcatgcagaccacacaaggcagatgggctatataaacgttttcgcttttccgtttacgatatatagtctactcttgtgcagaatgaattctcgtaactacatagcacaagtagatgtagttaactttaatctcacatagcaatctttaatcagtgtgtaacattagggaggacttgaaagagccaccacattttcaccgaggccacgcggagtacgatcgagtgtacagtgaacaatgctagggagagctgcctatatggaagagccctaatgtgtaaaattaattttagtagtgctatccccatgtg

SEQ ID NO: 64 - DNA, 6140 bp, synthetic construct
  misc_feature 1..6140: note = pcDNA3.1/Hygro(+)_M
  source 1..6140: mol_type = other DNA
gacggatcgggagatctcccgatcccctatggtgcactctcagtacaatctgctctgatgccgcatagttaagccagtatctgctccctgcttgtgtgttggaggtcgctgagtagtgcgcgagcaaaatttaagctacaacaaggcaaggcttgaccgacaattgcatgaagaatctgcttagggttaggcgttttgcgctgcttcgcgatgtacgggccagatatacgcgttgacattgattattgactagttattaatagtaatcaattacggggtcattagttcatagcccatatatggagttccgcgttacataacttacggtaaatggcccgcctggctgaccgcccaacgacccccgcccattgacgtcaataatgacgtatgttcccatagtaacgccaatagggactttccattgacgtcaatgggtggagtatttacggtaaactgcccacttggcagtacatcaagtgtatcatatgccaagtacgccccctattgacgtcaatgacggtaaatggcccgcctggcattatgcccagtacatgaccttatgggactttcctacttggcagtacatctacgtattagtcatcgctattaccatggtgatgcggttttggcagtacatcaatgggcgtggatagcggtttgactcacggggatttccaagtctccaccccattgacgtcaatgggagtttgttttggcaccaaaatcaacgggactttccaaaatgtcgtaacaactccgccccattgacgcaaatgggcggtaggcgtgtacggtgggaggtctatataagcagagctctctggctaactagagaacccactgcttactggcttatcgaaattaatacgactcactatagggagacatggcagattccaacggtactattaccgttgaagagcttaaaaagctccttgaacaatggaacctagtaataggtttcctattccttacatggatttgtcttctacaatttgcctatgccaacaggaataggtttttgtatataattaagttaattttcctctggctgttatggccagtaactttagcttgttttgtgcttgctgctgtttacagaataaattggatcaccggtggaattgctatcgcaatggcttgtcttgtaggcttgatgtggctcagctacttcattgcttctttcagactgtttgcgcgtacgcgttccatgtggtcattcaatccagaaactaacattcttctcaacgtgccactccatggcactattctgaccagaccgcttctagaaagtgaactcgtaatcggagctgtgatccttcgtggacatcttcgtattgctggacaccatctaggacgctgtgacatcaaggacctgcctaaagaaatcactgttgctacatcacgaacgctttcttattacaaattgggagcttcgcagcgtgtagcaggtgactcaggttttgctgcatacagtcgctacaggattggcaactataaattaaacacagaccattccagtagcagtgacaatattgctttgcttgtacagtaagctgatcagcctcgactgtgccttctagttgccagccatctgttgtttgcccctcccccgtgccttccttgaccctggaaggtgccactcccactgtcctttcctaataaaatgaggaaattgcatcgcattgtctgagtaggtgtcattctattctggggggtggggtggggcaggacagcaagggggaggattgggaagacaatagcaggcatgctggggatgcggtgggctctatggcttctgaggcggaaagaaccagctggggctctagggggtatccccacgcgccctgtagcggcgcattaagcgcggcgggtgtggtggttacgcgcagcgtgaccgctacacttgccagcgccctagcgcccgctcctttcgctttcttcccttcctttctcgccacgttcgccggctttccccgtcaagctctaaatcgggggctccctttagggttccgatttagtgctttacggcacctcgaccccaaaaaacttgattagggtgatggttcacgtagtgggccatcgccctgatagacggtttttcgccctttgacgttggagtccacgttctttaatagtggactcttgttccaaactggaacaacactcaaccctatctcggtctattcttttgatttataagggattttgccgatttcggcctattggttaaaaaatgagctgatttaacaaaaatttaacgcgaattaattctgtggaatgtgtgtcagttagggtgtggaaagtccccaggctccccagcaggcagaagtatgcaaagcatgcatctcaattagtcagcaaccaggtgtggaaagtccccaggctccccagcaggcagaagtatgcaaagcatgcatctcaattagtcagcaaccatagtcccgcccctaactccgcccatcccgcccctaactccgcccagttccgcccattctccgccccatggctgactaattttttttatttatgcagaggccgaggccgcctctgcctctgagctattccagaagtagtgaggaggcttttttggaggcctaggcttttgcaaaaagctcccgggagcttgtatatccattttcggatctgatcagcacgtgatgaaaaagcctgaactcaccgcgacgtctgtcgagaagtttctgatcgaaaagttcgacagcgtctccgacctgatgcagctctcggagggcgaagaatctcgtgctttcagcttcgatgtaggagggcgtggatatgtcctgcgggtaaatagctgcgccgatggtttctacaaagatcgttatgtttatcggcactttgcatcggccgcgctcccgattccggaagtgcttgacattggggaattcagcgagagcctgacctattgcatctcccgccgtgcacagggtgtcacgttgcaagacctgcctgaaaccgaactgcccgctgttctgcagccggtcgcggaggccatggatgcgatcgctgcggccgatcttagccagacgagcgggttcggcccattcggaccgcaaggaatcggtcaatacactacatggcgtgatttcatatgcgcgattgctgatccccatgtgtatcactggcaaactgtgatggacgacaccgtcagtgcgtccgtcgcgcaggctctcgatgagctgatgctttgggccgaggactgccccgaagtccggcacctcgtgcacgcggatttcggctccaacaatgtcctgacggacaatggccgcataacagcggtcattgactggagcgaggcgatgttcggggattcccaatacgaggtcgccaacatcttcttctggaggccgtggttggcttgtatggagcagcagacgcgctacttcgagcggaggcatccggagcttgcaggatcgccgcggctccgggcgtatatgctccgcattggtcttgaccaactctatcagagcttggttgacggcaatttcgatgatgcagcttgggcgcagggtcgatgcgacgcaatcgtccgatccggagccgggactgtcgggcgtacacaaatcgcccgcagaagcgcggccgtctggaccgatggctgtgtagaagtactcgccgatagtggaaaccgacgccccagcactcgtccgagggcaaaggaatagcacgtgctacgagatttcgattccaccgccgccttctatgaaaggttgggcttcggaatcgttttccgggacgccggctggatgatcctccagcgcggggatctcatgctggagttcttcgcccaccccaacttgtttattgcagcttataatggttacaaataaagcaatagcatcacaaatttcacaaataaagcatttttttcactgcattctagttgtggtttgtccaaactcatcaatgtatcttatcatgtctgtataccgtcgacctctagctagagcttggcgtaatcatggtcatagctgtttcctgtgtgaaattgttatccgctcacaattccacacaacatacgagccggaagcataaagtgtaaagcctggggtgcctaatgagtgagctaactcacattaattgcgttgcgctcactgcccgctttccagtcgggaaacctgtcgtgccagctgcattaatgaatcggccaacgcgcggggagaggcggtttgcgtattgggcgctcttccgcttcctcgctcactgactcgctgcgctcggtcgttcggctgcggcgagcggtatcagctcactcaaaggcggtaatacggttatccacagaatcaggggataacgcaggaaagaacatgtgagcaaaaggccagcaaaaggccaggaaccgtaaaaaggccgcgttgctggcgtttttccataggctccgcccccctgacgagcatcacaaaaatcgacgctcaagtcagaggtggcgaaacccgacaggactataaagataccaggcgtttccccctggaagctccctcgtgcgctctcctgttccgaccctgccgcttaccggatacctgtccgcctttctcccttcgggaagcgtggcgctttctcatagctcacgctgtaggtatctcagttcggtgtaggtcgttcgctccaagctgggctgtgtgcacgaaccccccgttcagcccgaccgctgcgccttatccggtaactatcgtcttgagtccaacccggtaagacacgacttatcgccactggcagcagccactggtaacaggattagcagagcgaggtatgtaggcggtgctacagagttcttgaagtggtggcctaactacggctacactagaagaacagtatttggtatctgcgctctgctgaagccagttaccttcggaaaaagagttggtagctcttgatccggcaaacaaaccaccgctggtagcggtttttttgtttgcaagcagcagattacgcgcagaaaaaaaggatctcaagaagatcctttgatcttttctacggggtctgacgctcagtggaacgaaaactcacgttaagggattttggtcatgagattatcaaaaaggatcttcacctagatccttttaaattaaaaatgaagttttaaatcaatctaaagtatatatgagtaaacttggtctgacagttaccaatgcttaatcagtgaggcacctatctcagcgatctgtctatttcgttcatccatagttgcctgactccccgtcgtgtagataactacgatacgggagggcttaccatctggccccagtgctgcaatgataccgcgagacccacgctcaccggctccagatttatcagcaataaaccagccagccggaagggccgagcgcagaagtggtcctgcaactttatccgcctccatccagtctattaattgttgccgggaagctagagtaagtagttcgccagttaatagtttgcgcaacgttgttgccattgctacaggcatcgtggtgtcacgctcgtcgtttggtatggcttcattcagctccggttcccaacgatcaaggcgagttacatgatcccccatgttgtgcaaaaaagcggttagctccttcggtcctccgatcgttgtcagaagtaagttggccgcagtgttatcactcatggttatggcagcactgcataattctcttactgtcatgccatccgtaagatgcttttctgtgactggtgagtactcaaccaagtcattctgagaatagtgtatgcggcgaccgagttgctcttgcccggcgtcaatacgggataataccgcgccacatagcagaactttaaaagtgctcatcattggaaaacgttcttcggggcgaaaactctcaaggatcttaccgctgttgagatccagttcgatgtaacccactcgtgcacccaactgatcttcagcatcttttactttcaccagcgtttctgggtgagcaaaaacaggaaggcaaaatgccgcaaaaaagggaataagggcgacacggaaatgttgaatactcatactcttcctttttcaatattattgaagcatttatcagggttattgtctcatgagcggatacatatttgaatgtatttagaaaaataaacaaataggggttccgcgcacatttccccgaaaagtgccacctgacgtc

SEQ ID NO: 65 - DNA, 2572 bp, synthetic construct
  misc_feature 1..2572: note = delta E (GFP)
  source 1..2572: mol_type = other DNA
gcacaagctgatgagtacgaacttatgtactcattcgtttcggaagagacaatggtgagcaagggcgaggagctgttcaccggggtggtgcccatcctggtcgagctggacggcgacgtaaacggccacaagttcagcgtgtccggcgagggcgagggcgatgccacctacggcaagctgaccctgaagttcatctgcaccaccggcaagctgcccgtgccctggcccaccctcgtgaccaccctgacctacggcgtgcagtgcttcagccgctaccccgaccacatgaagcagcacgacttcttcaagtccgccatgcccgaaggctacgtccaggagcgcaccatcttcttcaaggacgacggcaactacaagacccgcgccgaggtgaagttcgagggcgacaccctggtgaaccgcatcgagctgaagggcatcgacttcaaggaggacggcaacatcctggggcacaagctggagtacaactacaacagccacaacgtctatatcatggccgacaagcagaagaacggcatcaaggtgaacttcaagatccgccacaacatcgaggacggcagcgtgcagctcgccgaccactaccagcagaacacccccatcggcgacggccccgtgctgctgcccgacaaccactacctgagcacccagtccgccctgagcaaagaccccaacgagaagcgcgatcacatggtcctgctggagttcgtgaccgccgccgggatcactctcggcatggacgagctgtacaagtaaacgaactaaatattatattagtttttctgtttggaactttaattttagccatggcagattccaacggtactattaccgttgaagagcttaaaaagctccttgaacaatggaacctagtaataggtttcctattccttacatggatttgtcttctacaatttgcctatgccaacaggaataggtttttgtatataattaagttaattttcctctggctgttatggccagtaactttagcttgttttgtgcttgctgctgtttacagaataaattggatcaccggtggaattgctatcgcaatggcttgtcttgtaggcttgatgtggctcagctacttcattgcttctttcagactgtttgcgcgtacgcgttccatgtggtcattcaatccagaaactaacattcttctcaacgtgccactccatggcactattctgaccagaccgcttctagaaagtgaactcgtaatcggagctgtgatccttcgtggacatcttcgtattgctggacaccatctaggacgctgtgacatcaaggacctgcctaaagaaatcactgttgctacatcacgaacgctttcttattacaaattgggagcttcgcagcgtgtagcaggtgactcaggttttgctgcatacagtcgctacaggattggcaactataaattaaacacagaccattccagtagcagtgacaatattgctttgcttgtacagtaagtgacaacagatgtttcatctcgttgactttcaggttactatagcagagatattactaattattatgaggacttttaaagtttccatttggaatcttgattacatcataaacctcataattaaaaatttatctaagtcactaactgagaataaatattctcaattagatgaagagcaaccaatggagattgattaaacgaacatgaaaattattcttttcttggcactgataacactcgctacttgtgagctttatcactaccaagagtgtgttagaggtacaacagtacttttaaaagaaccttgctcttctggaacatacgagggcaattcaccatttcatcctctagctgataacaaatttgcactgacttgctttagcactcaatttgcttttgcttgtcctgacggcgtaaaacacgtctatcagttacgtgccagatcagtttcacctaaactgttcatcagacaagaggaagttcaagaactttactctccaatttttcttattgttgcggcaatagtgtttataacactttgcttcacactcaaaagaaagacagaatgattgaactttcattaattgacttctatttgtgctttttagcctttctgctattccttgttttaattatgcttattatcttttggttctcacttgaactgcaagatcataatgaaacttgtcacgcctaaacgaacatgaaatttcttgttttcttaggaatcatcacaactgtagctgcatttcaccaagaatgtagtttacagtcatgtactcaacatcaaccatatgtagttgatgacccgtgtcctattcacttctattctaaatggtatattagagtaggagctagaaaatcagcacctttaattgaattgtgcgtggatgaggctggttctaaatcacccattcagtacatcgatatcggtaattatacagtttcctgtttaccttttacaattaattgccaggaacctaaattgggtagtcttgtagtgcgttgttcgttctatgaagactttttagagtatcatgacgttcgtgttgttttagatttcatctaaacgaacaaactaaa

SEQ ID NO: 66 - DNA, 820 bp, synthetic construct
  misc_feature 1..820: note = delta M delta 6 delta 8 with spacer
  source 1..820: mol_type = other DNA
gcacaagctgatgagtacgaacttatgtactcattcgtttcggaagagacaggtacgttaatagttaatagcgtacttctttttcttgctttcgtggtattcttgctagttacactagccatccttactgcgcttcgattgtgtgcgtactgctgcaatattgttaacgtgagtcttgtaaaaccttctttttacgtttactctcgtgttaaaaatctgaattcttctagagttcctgatcttccggtctaaacgaactaaatattatattagtttttctgtttggaactttaattttagccgtgacaacagatgaaaattattcttttcttggcactgataacactcgctacttgtgagctttatcactaccaagagtgtgttagaggtacaacagtacttttaaaagaaccttgctcttctggaacatacgagggcaattcaccatttcatcctctagctgataacaaatttgcactgacttgctttagcactcaatttgcttttgcttgtcctgacggcgtaaaacacgtctatcagttacgtgccagatcagtttcacctaaactgttcatcagacaagaggaagttcaagaactttactctccaatttttcttattgttgcggcaatagtgtttataacactttgcttcacactcaaaagaaagacagaatgattgaactttcattaattgacttctatttgtgctttttagcctttctgctattccttgttttaattatgcttattatcttttggttctcacttgaactgcaagatcataatgaaacttgtcacgcctaaacgaacaaactaaa

SEQ ID NO: 67 - DNA, 766 bp, synthetic construct
  misc_feature 1..766: note = delta M delta 6 delta 8 without spacer
  source 1..766: mol_type = other DNA
gcacaagctgatgagtacgaacttatgtactcattcgtttcggaagagacaggtacgttaatagttaatagcgtacttctttttcttgctttcgtggtattcttgctagttacactagccatccttactgcgcttcgattgtgtgcgtactgctgcaatattgttaacgtgagtcttgtaaaaccttctttttacgtttactctcgtgttaaaaatctgaattcttctagagttcctgatcttccggtctaaacgaacatgaaaattattcttttcttggcactgataacactcgctacttgtgagctttatcactaccaagagtgtgttagaggtacaacagtacttttaaaagaaccttgctcttctggaacatacgagggcaattcaccatttcatcctctagctgataacaaatttgcactgacttgctttagcactcaatttgcttttgcttgtcctgacggcgtaaaacacgtctatcagttacgtgccagatcagtttcacctaaactgttcatcagacaagaggaagttcaagaactttactctccaatttttcttattgttgcggcaatagtgtttataacactttgcttcacactcaaaagaaagacagaatgattgaactttcattaattgacttctatttgtgctttttagcctttctgctattccttgttttaattatgcttattatcttttggttctcacttgaactgcaagatcataatgaaacttgtcacgcctaaacgaacaaactaaa

SEQ ID NO: 68 - DNA, 14617 bp, synthetic construct
  misc_feature 1..14617: note = Fragment D
  source 1..14617: mol_type = other DNA
gcccgctttccagtcgggaaacctgtcgtgccagctgcattaatgaatcggccaacgcgcggggagaggcggtttgcgtattgggcgctcttccgcttcctcgctcactgactcgctgcgctcggtcgttcggctgcggcgagcggtatcagctcactcaaaggcggtaatacggttatccacagaatcaggggataacgcaggaaagaacatgtgagcaaaaggccagcaaaaggccaggaaccgtaaaaaggccgcgttgctggcgtttttccataggctccgcccccctgacgagcatcacaaaaatcgacgctcaagtcagaggtggcgaaacccgacaggactataaagataccaggcgtttccccctggaagctccctcgtgcgctctcctgttccgaccctgccgcttaccggatacctgtccgcctttctcccttcgggaagcgtggcgctttctcatagctcacgctgtaggtatctcagttcggtgtaggtcgttcgctccaagctgggctgtgtgcacgaaccccccgttcagcccgaccgctgcgccttatccggtaactatcgtcttgagtccaacccggtaagacacgacttatcgccactggcagcagccactggtaacaggattagcagagcgaggtatgtaggcggtgctacagagttcttgaagtggtggcctaactacggctacactagaagaacagtatttggtatctgcgctctgctgaagccagttaccttcggaaaaagagttggtagctcttgatccggcaaacaaaccaccgctggtagcggtggtttttttgtttgcaagcagcagattacgcgcagaaaaaaaggatctcaagaagatcctttgatcttttctacggggtctgacgctcagtggaacgaaaactcacgttaagggattttggtcatgagattatcaaaaaggatcttcacctagatccttttaaattaaaaatgaagttttaaatcaatctaaagtatatatgagtaaacttggtctgacagttaccaatgcttaatcagtgaggcacctatctcagcgatctgtctatttcgttcatccatagttgcctgactccccgtcgtgtagataactacgatacgggagggcttaccatctggccccagtgctgcaatgataccgcgagacccacgctcaccggctccagatttatcagcaataaaccagccagccggaagggccgagcgcagaagtggtcctgcaactttatccgcctccatccagtctattaattgttgccgggaagctagagtaagtagttcgccagttaatagtttgcgcaacgttgttgccattgctacaggcatcgtggtgtcacgctcgtcgtttggtatggcttcattcagctccggttcccaacgatcaaggcgagttacatgatcccccatgttgtgcaaaaaagcggttagctccttcggtcctccgatcgttgtcagaagtaagttggccgcagtgttatcactcatggttatggcagcactgcataattctcttactgtcatgccatccgtaagatgcttttctgtgactggtgagtactcaaccaagtcattctgagaatagtgtatgcggcgaccgagttgctcttgcccggcgtcaatacgggataataccgcgccacatagcagaactttaaaagtgctcatcattggaaaacgttcttcggggcgaaaactctcaaggatcttaccgctgttgagatccagttcgatgtaacccactcgtgcacccaactgatcttcagcatcttttactttcaccagcgtttctgggtgagcaaaaacaggaaggcaaaatgccgcaaaaaagggaataagggcgacacggaaatgttgaatactcatactcttcctttttcaatattattgaagcatttatcagggttattgtctcatgagcggatacatatttgaatgtatttagaaaaataaacaaataggggttccgcgcacatttccccgaaaagtgccacctgacgtctaagaaaccattattatcatgacattaacctataaaaataggcgtatcacgaggccctttcgtctcgcgcgtttcggtgatgacggtgaaaacctctgacacatgcagctcccggagacggtcacagcttgtctgtaagcggatgccgggagcagacaagcccgtcagggcgcgtcagcgggtgttggcgggtgtcggggctggcttaactatgcggcatcagagcagattgtactgagagtgcaccatatgcggtgtgaaataccgcacagatgcgtaaggagaaaataccgcatcaggcgccattcgccattcaggctgcgcaactgttgggaagggcgatcggtgcgggcctcttcgctattacgccagctggcgaaagggggatgtgctgcaaggcgattaagttgggtaacgccagggttttcccagtcacgacgttgtaaaacgacggccagtgaattcgagctcggtacctcgcgaatgcatctagatcgtctctcagatcttaatgactttgtctctgatgcagattcaactttgattggtgattgtgcaactgtacatacagctaataaatgggatctcattattagtgatatgtacgaccctaagactaaaaatgttacaaaagaaaatgactctaaagagggttttttcacttacatttgtgggtttatacaacaaaagctagctcttggaggttccgtggctataaagataacagaacattcttggaatgctgatctttataagctcatgggacacttcgcatggtggacagcctttgttactaatgtgaatgcgtcatcatctgaagcatttttaattggatgtaattatcttggcaaaccacgcgaacaaatagatggttatgtcatgcatgcaaattacatattttggaggaatacaaatccaattcagttgtcttcctattctttatttgacatgagtaaatttccccttaaattaaggggtactgctgttatgtctttaaaagaaggtcaaatcaatgatatgattttatctcttcttagtaaaggtagacttataattagagaaaacaacagagttgttatttctagtgatgttcttgttaacaactaaacgaacaatgtttgtttttcttgttttattgccactagtctctagtcagtgtgttaatcttacaaccagaactcaattaccccctgcatacactaattctttcacacgtggtgtttattaccctgacaaagttttcagatcctcagttttacattcaactcaggacttgttcttacctttcttttccaatgttacttggttccatgctatacatgtctctgggaccaatggtactaagaggtttgataaccctgtcctaccatttaatgatggtgtttattttgcttccactgagaagtctaacataataagaggctggatttttggtactactttagattcgaagacccagtccctacttattgttaataacgctactaatgttgttattaaagtctgtgaatttcaattttgtaatgatccatttttgggtgtttattaccacaaaaacaacaaaagttggatggaaagtgagttcagagtttattctagtgcgaataattgcacttttgaatatgtctctcagccttttcttatggaccttgaaggaaaacagggtaatttcaaaaatcttagggaatttgtgtttaagaatattgatggttattttaaaatatattctaagcacacgcctattaatttagtgcgtgatctccctcagggtttttcggctttagaaccattggtagatttgccaataggtattaacatcactaggtttcaaactttacttgctttacatagaagttatttgactcctggtgattcttcttcaggttggacagctggtgctgcagcttattatgtgggttatcttcaacctaggacttttctattaaaatataatgaaaatggaaccattacagatgctgtagactgtgcacttgaccctctctcagaaacaaagtgtacgttgaaatccttcactgtagaaaaaggaatctatcaaacttctaactttagagtccaaccaacagaatctattgttagatttcctaatattacaaacttgtgcccttttggtgaagtttttaacgccaccagatttgcatctgtttatgcttggaacaggaagagaatcagcaactgtgttgctgattattctgtcctatataattccgcatcattttccacttttaagtgttatggagtgtctcctactaaattaaatgatctctgctttactaatgtctatgcagattcatttgtaattagaggtgatgaagtcagacaaatcgctccagggcaaactggaaagattgctgattataattataaattaccagatgattttacaggctgcgttatagcttggaattctaacaatcttgattctaaggttggtggtaattataattacctgtatagattgtttaggaagtctaatctcaaaccttttgagagagatatttcaactgaaatctatcaggccggtagcacaccttgtaatggtgttgaaggttttaattgttactttcctttacaatcatatggtttccaacccactaatggtgttggttaccaaccatacagagtagtagtactttcttttgaacttctacatgcaccagcaactgtttgtggacctaaaaagtctactaatttggttaaaaacaaatgtgtcaatttcaacttcaatggtttaacaggcacaggtgttcttactgagtctaacaaaaagtttctgcctttccaacaatttggcagagacattgctgacactactgatgctgtccgtgatccacagacacttgagattcttgacattacaccatgttcttttggtggtgtcagtgttataacaccaggaacaaatacttctaaccaggttgctgttctttatcaggatgttaactgcacagaagtccctgttgctattcatgcagatcaacttactcctacttggcgtgtttattctacaggttctaatgtttttcaaacacgtgcaggctgtttaataggggctgaacatgtcaacaactcatatgagtgtgacatacccattggtgcaggtatatgcgctagttatcagactcagactaattctcctcggcgggcacgtagtgtagctagtcaatccatcattgcctacactatgtcacttggtgcagaaaattcagttgcttactctaataactctattgccatacccacaaattttactattagtgttaccacagaaattctaccagtgtctatgaccaagacatcagtagattgtacaatgtacatttgtggtgattcaactgaatgcagcaatcttttgttgcaatatggcagtttttgtacacaattaaaccgtgctttaactggaatagctgttgaacaagacaaaaacacccaagaagtttttgcacaagtcaaacaaatttacaaaacaccaccaattaaagattttggtggttttaatttttcacaaatattaccagatccatcaaaaccaagcaagaggtcatttattgaagatctacttttcaacaaagtgacacttgcagatgctggcttcatcaaacaatatggtgattgccttggtgatattgctgctagagacctcatttgtgcacaaaagtttaacggccttactgttttgccacctttgctcacagatgaaatgattgctcaatacacttctgcactgttagcgggtacaatcacttctggttggacctttggtgcaggtgctgcattacaaataccatttgctatgcaaatggcttataggtttaatggtattggagttacacagaatgttctctatgagaaccaaaaattgattgccaaccaatttaatagtgctattggcaaaattcaagactcactttcttccacagcaagtgcacttggaaaacttcaagatgtggtcaaccaaaatgcacaagctttaaacacgcttgttaaacaacttagctccaattttggtgcaatttcaagtgttttaaatgatatcctttcacgtcttgacaaagttgaggctgaagtgcaaattgataggttgatcacaggcagacttcaaagtttgcagacatatgtgactcaacaattaattagagctgcagaaatcagagcttctgctaatcttgctgctactaaaatgtcagagtgtgtacttggacaatcaaaaagagttgatttttgtggaaagggctatcatcttatgtccttccctcagtcagcacctcatggtgtagtcttcttgcatgtgacttatgtccctgcacaagaaaagaacttcacaactgctcctgccatttgtcatgatggaaaagcacactttcctcgtgaaggtgtctttgtttcaaatggcacacactggtttgtaacacaaaggaatttttatgaaccacaaatcattactacagacaacacatttgtgtctggtaactgtgatgttgtaataggaattgtcaacaacacagtttatgatcctttgcaacctgaattagactcattcaaggaggagttagataaatattttaagaatcatacatcaccagatgttgatttaggtgacatctctggcattaatgcttcagttgtaaacattcaaaaagaaattgaccgcctcaatgaggttgccaagaatttaaatgaatctctcatcgatctccaagaacttggaaagtatgagcagtatataaaatggccatggtacatttggctaggttttatagctggcttgattgccatagtaatggtgacaattatgctttgctgtatgaccagttgctgtagttgtctcaagggctgttgttcttgtggatcctgctgcaaatttgatgaagacgactctgagccagtgctcaaaggagtcaaattacattacacataaacgaacttatggatttgtttatgagaatcttcacaattggaactgtaactttgaagcaaggtgaaatcaaggatgctactccttcagattttgttcgcgctactgcaacgataccgatacaagcctcactccctttcggatggcttattgttggcgttgcacttcttgctgtttttcagagcgcttccaaaatcataaccctcaaaaagagatggcaactagcactctccaagggtgttcactttgtttgcaacttgctgttgttgtttgtaacagtttactcacaccttttgctcgttgctgctggccttgaagccccttttctctatctttatgctttagtctacttcttgcagagtataaactttgtaagaataataatgaggctttggctttgctggaaatgccgttccaaaaacccattactttatgatgccaactattttctttgctggcatactaattgttacgactattgtataccttacaatagtgtaacttcttcaattgtcattacttcaggtgatggcacaacaagtcctatttctgaacatgactaccagattggtggttatactgaaaaatgggaatctggagtaaaagactgtgttgtattacacagttacttcacttcagactattaccagctgtactcaactcaattgagtacagacactggtgttgaacatgttaccttcttcatctacaataaaattgttgatgagcctgaagaacatgtccaaattcacacaatcgacgtttcatccggagttgttaatccagtaatggaaccaatttatgatgaaccgacgacgactactagcgtgcctttgtaagcacaagctgatgagtacgaacttatgtactcattcgtttcggaagagacaggtacgttaatagttaatagcgtacttctttttcttgctttcgtggtattcttgctagttacactagccatccttactgcgcttcgattgtgtgcgtactgctgcaatattgttaacgtgagtcttgtaaaaccttctttttacgtttactctcgtgttaaaaatctgaattcttctagagttcctgatcttctggtctaaacgaactaaatattatattagtttttctgtttggaactttaattttagccatggcagattccaacggtactattaccgttgaagagcttaaaaagctccttgaacaatggaacctagtaataggtttcctattccttacatggatttgtcttctacaatttgcctatgccaacaggaataggtttttgtatataattaagttaattttcctctggctgttatggccagtaactttagcttgttttgtgcttgctgctgtttacagaataaattggatcaccggtggaattgctatcgcaatggcttgtcttgtaggcttgatgtggctcagctacttcattgcttctttcagactgtttgcgcgtacgcgttccatgtggtcattcaatccagaaactaacattcttctcaacgtgccactccatggcactattctgaccagaccgcttctagaaagtgaactcgtaatcggagctgtgatccttcgtggacatcttcgtattgctggacaccatctaggacgctgtgacatcaaggacctgcctaaagaaatcactgttgctacatcacgaacgctttcttattacaaattgggagcttcgcagcgtgtagcaggtgactcaggttttgctgcatacagtcgctacaggattggcaactataaattaaacacagaccattccagtagcagtgacaatattgctttgcttgtacagtaagtgacaacagatgtttcatctcgttgactttcaggttactatagcagagatattactaattattatgaggacttttaaagtttccatttggaatcttgattacatcataaacctcataattaaaaatttatctaagtcactaactgagaataaatattctcaattagatgaagagcaaccaatggagattgattaaacgaacatgaaaattattcttttcttggcactgataacactcgctacttgtgagctttatcactaccaagagtgtgttagaggtacaacagtacttttaaaagaaccttgctcttctggaacatacgagggcaattcaccatttcatcctctagctgataacaaatttgcactgacttgctttagcactcaatttgcttttgcttgtcctgacggcgtaaaacacgtctatcagttacgtgccagatcagtttcacctaaactgttcatcagacaagaggaagttcaagaactttactctccaatttttcttattgttgcggcaatagtgtttataacactttgcttcacactcaaaagaaagacagaatgattgaactttcattaattgacttctatttgtgctttttagcctttctgctattccttgttttaattatgcttattatcttttggttctcacttgaactgcaagatcataatgaaacttgtcacgcctaaacgaacatgaaatttcttgttttcttaggaatcatcacaactgtagctgcatttcaccaagaatgtagtttacagtcatgtactcaacatcaaccatatgtagttgatgacccgtgtcctattcacttctattctaaatggtatattagagtaggagctagaaaatcagcacctttaattgaattgtgcgtggatgaggctggttctaaatcacccattcagtacatcgatatcggtaattatacagtttcctgtttaccttttacaattaattgccaggaacctaaattgggtagtcttgtagtgcgttgttcgttctatgaagactttttagagtatcatgacgttcgtgttgttttagatttcatctaaacgaacaaactaaaatgtctgataatggaccccaaaatcagcgaaatgcaccccgcattacgtttggtggaccctcagattcaactggcagtaaccagaatggagaacgcagtggggcgcgatcaaaacaacgtcggccccaaggtttacccaataatactgcgtcttggttcaccgctctcactcaacatggcaaggaagaccttaaattccctcgaggacaaggcgttccaattaacaccaatagcagtccagatgaccaaattggctactaccgaagagctaccagacgaattcgtggtggtgacggtaaaatgaaagatctcagtccaagatggtatttctactacctaggaactgggccagaagctggacttccctatggtgctaacaaagacggcatcatatgggttgcaactgagggagccttgaatacaccaaaagatcacattggcacccgcaatcctgctaacaatgctgcaatcgtgctacaacttcctcaaggaacaacattgccaaaaggcttctacgcagaagggagcagaggcggcagtcaagcctcttctcgttcctcatcacgtagtcgcaacagttcaagaaattcaactccaggcagcagtaggggaacttctcctgctagaatggctggcaatggcggtgatgctgctcttgctttgctgctgcttgacagattgaaccagcttgagagcaaaatgtctggtaaaggccaacaacaacaaggccaaactgtcactaagaaatctgctgctgaggcttctaagaagcctcggcaaaaacgtactgccactaaagcatacaatgtaacacaagctttcggcagacgtggtccagaacaaacccaaggaaattttggggaccaggaactaatcagacaaggaactgattacaaacattggccgcaaattgcacaatttgcccccagcgcttcagcgttcttcggaatgtcgcgcattggcatggaagtcacaccttcgggaacgtggttgacctacacaggtgccatcaaattggatgacaaagatccaaatttcaaagatcaagtcattttgctgaataagcatattgacgcatacaaaacattcccaccaacagagcctaaaaaggacaaaaagaagaaggctgatgaaactcaagccttaccgcagagacagaagaaacagcaaactgtgactcttcttcctgctgcagatttggatgatttctccaaacaattgcaacaatccatgagcagtgctgactcaactcaggcctaaactcatgcagaccacacaaggcagatgggctatataaacgttttcgcttttccgtttacgatatatagtctactcttgtgcagaatgaattctcgtaactacatagcacaagtagatgtagttaactttaatctcacatagcaatctttaatcagtgtgtaacattagggaggacttgaaagagccaccacattttcaccgaggccacgcggagtacgatcgagtgtacagtgaacaatgctagggagagctgcctatatggaagagccctaatgtgtaaaattaattttagtagtgctatccccatgtgattttaatagcttcttaggagaatgacaaaaaaaaaaaaaaaaaaaaaaaaaaaaaaaaaaaaggccggcatggtcccagcctcctcgctggcgccggctgggcaacattccgaggggaccgtcccctcggtaatggcgaatgggacaacttgtttattgcagcttataatggttacaaataaagcaatagcatcacaaatttcacaaataaagcatttttttcactgcattctagttgtggtttgtccaaactcatcaatgtatcttatcatgtctggcggccgctgagacgatcggatccgcataggctgaggggacggatcgcttgcctgtaacttacacgcgcctcgtatcttttaatgatggaataatttgggaatttactctgtgtttatttatttttatgttttgtatttggattttagaaagtaaataaagaaggtagaagagttacggaatgaagaaaaaaaaataaacaaaggtttaaaaaatttcaacaaaaagcgtactttacatatatatttattagacaagaaaagcagattaaatagatatacattcgattaacgataagtaaaatgtaaaatcacaggattttcgtgtgtggtcttctacacagacaagatgaaacaattcggcattaatacctgagagcaggaagagcaagataaaaggtagtatttgttggcgatccccctagagtcttttacatcttcggaaaacaaaaactattttttctttaatttctttttttactttctatttttaatttatatatttatattaaaaaatttaaattataattatttttatagcacgtgatgaaaaggaccctctccccgcgcgttggccgattcattaatgcagctggcacgacaggtttcccgactggaaagcgggcagtgagcgcaacgcaattaatgtgagttagctcactcattaggcaccccaggctttacactttatgcttccggctcgtatgttgtgtggaattgtgagcggataacaatttcacacaggaaacagctttaagccagccccgacacccgccaacacccgctgacgcgccctgacgggcttgtctgctcccggcatccgcttacagacaagctgtgaccgtctccgggagctgcatgtgtcagaggttttcaccgtcatcaccgaaacgcgcgagacgaaagggcctcgtgatacgcctatttttataggttaatgtcatgataataatggtttcttagacgtcgtatttttttttttttagagaaaatcctccaatatcaaattaggaatcgtagtttcatgattttctgttacacctaactttttgtgtggtgccctcctccttgtcaatattaatgttaaagtgcaattctttttccttatcacgttgagccattagtatcaatttgcttacctgtattcctttactatcctcctttttctccttcttgataaatgtatgtagattgcgtatatagtttcgtctaccctatgaacatattccattttgtaatttcgtgtcgtttctattatgaatttcatttataaagtttatgtacaaatatcataaaaaaagagaatctttttaagcaaggattttcttaacttcttcggcgacagcatcaccgacttcggtggtactgttggaaccacctaaatcaccagttctgatacctgcatccaaaacctttttaactgcatcttcaatggccttaccttcttcaggcaagttcaatgacaatttcaacatcattgcagcagacaagatagtggcgatagggtcaaccttattctttggcaaatctggagcagaaccgtgacatggttcgtacaaaccaaatgcggtgttcttgtctggcaaagaggccaaggacgcagatggcaacaaacccaaggaacctgggataacggaggcttcatcggagataatatcaccaaacatgttgctggtgattataataccatttaggtgggttgggttcttaactaggatcatggcggcagaatcaatcaattgatgttgaaccttcaatgtagggaattcgttcttgatggtttcctccacagtttttctccataatcttgaagaggccaaaacattagctttatccaaggaccaaataggcaatggtggctcatgttgtagggccatgaaagcggccattcttgtgattctttgcacttctggaacggtgtattgttcactatcccaagcgacaccatcaccatcgtcttcctttctcttaccaaagtaaatacctcccactaattctctgacaacaacgaagtcagtacctttagcaaattgtggcttgattggagataagtctaaaagagagtcggatgcaaagttacatggtcttaagttggcgtacaattgaagttctttacggatttttagtaaaccttgttcaggtctaacactaccggtaccccatttaggaccacccacagcacctaacaaaacggcatcaaccttcttggaggcttccagcgcctcatctggaagtgggacacctgtagcatcgatagcagcaccaccaattaaatgattttcgaaatcgaacttgacattggaacgaacatcagaaatagctttaagaaccttaatggcttcggctgtgatttcttgaccaacgtggtctcctggcaaaacgacgatcttcttaggggcagacataggggcagacattagaatggtatatccttgaaatatatatatatattgctgaaatgtaaaaggtaagaaaagttagaaagtaagacgattgctaaccacctattggaaaaaacaataggtccttaaataatattgtcaacttcaagtattgtgatgcaagcatttagtcatgaacgcttctctattctatatgaaaagccggttccggcctctcacctttcctttttctcccaatttttcagttgaaaaaggtatatgcgtcaggcgacctctgaaattaacaaaaaatttccagtcatcgaatttgattctgtgcgatagcgcccctgtgtgttctcgttatgttgaggaaaaaaatagcatgcaagcttggcgtaatcatggtcatagctgtttcctgtgtgaaattgttatccgctcacaattccacacaacatacgagccggaagcataaagtgtaaagcctggggtgcctaatgagtgagctaactcacattaattgcgttgcgctcact
